(19) United States
(12) Patent Application Publication
(10) Pub. No.: US 2026/0217799 A1
(43) Pub. Date: Jul. 30, 2026

(54) RNA COMPOSITIONS TARGETING HIV

(71) Applicant: BioNTech SE, Mainz (DE)

(72) Inventors: Valentin Le Douce, Mörfelden-Walldorf (DE); Felix Tolksdorf, Wiesbaden (DE); Johannes Nelke, Mainz (DE); Gábor Boros, Mainz (DE); Jonas Reinholz, Nierstein (DE); Katalin Karikó, Rydal, PA (US); Sergey Bessonov, Huerth (DE)

(21) Appl. No.: 19/144,213

(22) PCT Filed: Dec. 27, 2023
(86) PCT No.: PCT/IB2023/063293

§ 371 Date: Jun. 27, 2025

Related U.S. Application Data
(60) Provisional application No. 63/477,460, filed on Dec. 28, 2022.
(60) Provisional application No. 63/517,542, filed on Aug. 3, 2023.

(51) Int. Cl. C07K 16/114; A61K 39/00

(52) U.S. Cl. CPC C07K 16/114; A61K 2039/505; C07K 2317/52; C07K 2317/524; C07K 2317/526; C07K 2317/53; C07K 2317/622; C07K 2317/76; C07K 2317/94

(57) ABSTRACT

The present disclosure provides compositions (e.g., pharmaceutical compositions) for delivery of anti-HIV antibody agents and related technologies (e.g., components thereof and/or methods relating thereto). Among other things, the present disclosure provides polyribonucleotides encoding an immnunoglobulin chain of an anti-HIV antibody agent.

### CROSS REFERENCE TO RELATED APPLICATIONS

[0001] This application claims the benefit of U.S. Provisional Application No. 63/477,460, filed Dec. 28, 2022, and U.S. Provisional Application No. 63/517,542, filed Aug. 3, 2023, which are herein incorporated by reference in their entirety.

### BACKGROUND

[0002] Human Immunodeficiency Virus (HIV) is an infectious virus associated with Acquired Immune Deficiency Syndrome (AIDS). According to the World Health Organization, over 37 million people worldwide are currently affected by HIV. In 2020, approximately 680,000 people died from HIV-related causes and approximately 1.5 million people acquired HIV. There is currently no cure for HIV.

### SUMMARY

[0003] The present disclosure recognizes that HIV mutates rapidly. The highly mutable nature of HIV virons allows them to escape pressure from host immunity and/or treatment. To combat viral escape, combination therapies targeting HIV, including anti-HIV antibody agents, have been considered. However, the development of such combination therapies has been hindered by a number of challenges. First, development of individual HIV therapies is time consuming and expensive. For instance, anti-HIV antibody development is challenged by demanding and costly production, including purification and formulation methods associated with protein therapeutics. Second, combination therapies present regulatory challenges. In addition to ensuring that a combination therapy will be safe and efficacious, tight regulation over manufacture of the individual therapies, compounding of the multiple therapies together, and quality control during storage and administration complicate the use of combination therapies. Third, administration of antibodies to a subject can be painful and time consuming. Generally, antibodies are administered intravenously over a longer period of time. Administration of multiple antibodies can add to the complexity of antibody administration, increasing patient discomfort and taking up additional time. Finally, recombinant antibodies can have a short serum half-life.

[0004] The present disclosure provides insights that address these challenges, making it possible to not only deliver single anti-HIV antibody agents to a subject safely, reliably, and with strong potency, but also making it possible to deliver multiple anti-HIV therapeutics, including multiple anti-HIV antibody agents to a subject. For example, the present disclosure describes antibody agents or portions thereof (e.g., immunoglobulin chains) that are delivered to a subject via polyribonucleotides. Antibody agents that are delivered to a subject as one or more polyribonucleotides that encode the antibody agent are referred to herein as “RiboMabs.” After delivery of one or more polyribonucleotides that encode an antibody agent to a subject, the antibody agent, i.e., the “RiboMab” is expressed by the subject's body. Further, the term “RibobNAb” refers to a RiboMab that comprises all or part of a broadly neutralizing antibody (bNAb), e.g., a broadly neutralizing antibody targeting HIV. Utilizing polyribonucleotides as a therapeutic agent (in contrast to administering an antibody agent itself) involves simpler and less expensive manufacturing processes. The less complex production of polyribonucleotides encoding antibody agent(s) (e.g., anti-HIV antibody agent(s)) can streamline manufacture (e.g., by circumventing the need for intensive glycan production and profiling), mitigating regulatory and production challenges associated with developing and using antibody agents themselves. Additionally, polyribonucleotides are effective at producing similar effects to recombinant proteins but tend to require much lower volumes be administered to a subject. This is because polyribonucleotides encoding, e.g., anti-HIV antibody agent(s), can be administered to a subject and the subject's body produces the anti-HIV antibody agent(s) itself. Using a lower volume can provide a patient with a more pleasant experience and increase patient compliance with a treatment regimen. The present disclosure also provides technologies that address certain limitations of recombinant antibody technologies, including for example, the short serum half-life of recombinant antibodies by utilizing RNA technologies as a modality to express antibody agents directly in the patient's cells.

[0005] RiboMab technology also allows for two or more antibody agents to be administered to a subject simultaneously. Typically, an antibody produced by, e.g., humans, comprises four polypeptide chains—two “heavy” chains and two “light” chains. Each polypeptide chain (whether heavy or light) includes (1) a “variable” domain, having a sequence that varies among antibodies and a structure that determines the antigen to which an antibody binds, and (2) a “constant” domain(s), having a sequence and a structure that generally remain unchanged across antibodies of a given class, thus imparting little effect on antigen binding. In humans, specialized white blood cells, “B cells,” produce antibodies. Heavy chains and light chains are assembled to form an antibody through two key pairings: (1) the fragment crystallizable (Fc) domains of the two heavy chains pair together, and (2) the two light chains each pair with a heavy chain via disulfide linkages. During normal antibody production in a human, a single antibody is produced by a single B cell. In that situation, the correct pairing of heavy and light chains is ensured because only one species of heavy chain and one species of light chain are present in each B cell. However, the administration of a nucleic acid composition encoding more than one antibody agent to a subject requires the correct assembly of immunoglobulin chains (e.g., heavy chains and light chains) so that unwanted side products (e.g., antibody agents with unintended pairings) do not form.

[0006] Among other things, the present disclosure provides polyribonucleotides encoding an immunoglobulin chain of an antibody agent.

[0007] In one aspect, the present disclosure provides a polyribonucleotide encoding an immunoglobulin chain of an antibody agent, wherein the immunoglobulin chain comprises a single chain fragment variable (scFv), and the scFv comprises a heavy chain variable (VH) domain, a linker, and a light chain variable (VL) domain, wherein the VH domain comprises an HCDR1, an HCDR2, and an HCDR3, wherein the HCDR1, HCDR2, and HCDR3 comprise an amino acid sequence according to SEQ ID NO: 18, 21, and 24, respectively, and wherein the VH domain comprises a first mutation at residue 3 and a second mutation at residue 5 relative to the amino acid sequence according to SEQ ID NO: 1494; and wherein the VL domain comprises an LCDR1, an LCDR2, and an LCDR3, wherein the LCDR1, LCDR2, and LCDR3 comprise an amino acid sequence according to SEQ ID NO: 27, 30, and 33, respectively.

[0008] In some embodiments, the first mutation comprises a substitution mutation that results in a positively charged amino acid being present at residue 3. In some embodiments, the positively charged amino acid comprises an amino acid selected from Lys (K), Arg (R), or His (H). In some embodiments, the positively charged amino acid comprises a His (H) residue. In some embodiments, the second mutation comprises a substitution mutation that results in a polar amino acid being present at residue 5. In some embodiments, the polar amino acid comprises an amino acid selected from Ser (S), Thr (T), Tyr (Y), Asn (N), or Gln (Q). In some embodiments, the polar amino acid comprises a Thr (T) residue. In some embodiments, the VH domain comprises an amino acid sequence that is at least 85% identical to the amino acid sequence according to SEQ ID NO: 36. In some embodiments, the VH domain comprises an amino acid sequence that is at least 90% identical to the amino acid sequence according to SEQ ID NO: 36. In some embodiments, the VH domain comprises an amino acid sequence SEQ ID NO: 1494 with substitution mutations Q3H and V5T. In some embodiments, the VH domain comprises an amino acid sequence according to SEQ ID NO: 36.

[0009] In some embodiments, the VL domain comprises an amino acid sequence that is at least 85% identical to the amino acid sequence according to SEQ ID NO: 43. In some embodiments, the VL domain comprises an amino acid sequence that is at least 90% identical to the amino acid sequence according to SEQ ID NO: 43. In some embodiments, the VL domain comprises an amino acid sequence according to SEQ ID NO: 43.

[0010] In some embodiments, the scFv comprises, in order: (i) the VH domain, (ii) the linker, and (iii) the VL domain.

[0011] In some embodiments, the scFv comprises, in order: (i) the VL domain, (ii) the linker, and (iii) the VH domain.

[0012] In some embodiments, the linker comprises an amino acid sequence according to SEQ ID NO: 48. In some embodiments, the linker comprises an amino acid sequence according to SEQ ID NO: 59. In some embodiments, the immunoglobulin chain further comprises a second linker following the scFv domain. In some embodiments, the scFv and the second linker comprises or consists of an amino acid sequence according to SEQ ID NO: 64, 67, 70, or 73. In some embodiments, the immunoglobulin chain comprises a hinge domain following the second linker. In some embodiments, the hinge domain comprises or consists of an amino acid sequence according to SEQ ID NO: 167.

[0013] In some embodiments, the immunoglobulin chain comprises one or more constant domains, and wherein the scFv is operably linked to the one or more constant domains. In some embodiments, the hinge domain is between the scFv and the one or more constant domains. In some embodiments, the one or more constant domains comprise a CH3 domain. In some embodiments, the CH3 domain comprises a G1m17,1 or a G1m3 allotype. In some embodiments, the CH3 domain comprises one or more substitution mutations, wherein the one or more substitution mutations comprise or consist of M88L, N94S, or a combination thereof, and wherein the substitution mutation positions are relative to the amino acid sequence according to SEQ ID NO: 1495. In some embodiments, the CH3 domain comprises substitution mutations at residue 16 and residue 18 relative to the amino acid sequence according to SEQ ID NO: 1495. In some embodiments, the CH3 domain comprises an amino acid sequence SEQ ID NO: 1495 with substitution mutations D16E and L18M. In some embodiments, the CH3 domain comprises or consists of an amino acid sequence according to SEQ ID NO: 116.

[0014] In some embodiments, the immunoglobulin chain comprises or consists of a sequence according to SEQ ID NO: 1343. In some embodiments, the immunoglobulin chain comprises or consists of a sequence according to SEQ ID NO: 1346. In some embodiments, the immunoglobulin chain comprises or consists of a sequence according to SEQ ID NO: 1349. In some embodiments, the immunoglobulin chain comprises or consists of a sequence according to SEQ ID NO: 1352.

[0015] In some embodiments, the polyribonucleotide comprises a ribonucleic acid sequence encoding a secretion signal. In some embodiments, the secretion signal comprises a ribonucleic acid sequence that is at least 90% identical to SEQ ID NO: 4 or 8. In some embodiments, the secretion signal comprises a ribonucleic acid sequence comprises SEQ ID NO: 4 or 8.

[0016] In some embodiments, the polyribonucleotide comprises one or more non-coding sequence elements. In some embodiments, the one or more non-coding sequence elements enhances RNA stability and/or translation efficiency. In some embodiments, the one or more non-coding sequence elements comprise a 3′ untranslated region (UTR), a 5′ UTR, a 5′-cap, a polyadenine (polyA) tail, or any combination thereof. In some embodiments, the polyA tail is or comprises a modified polyA sequence, preferably an interrupted polyA tail. In some embodiments, the polyA tail comprises or consists of a sequence that is at least 90% identical to SEQ ID NO: 16. In some embodiments, the 3′ UTR comprises or consists of a nucleic acid sequence that is at least 90% identical to SEQ ID NO: 14. In some embodiments, the 5′ UTR comprises or consists of a nucleic acid sequence that is at least 90% identical to SEQ ID NO: 10. In some embodiments, the 5′-cap is (m27,3′-O)Gppp(m2′-O)ApG. In some embodiments, the polyribonucleotide comprises one or more modified ribonucleotides. In some embodiments, the one or more modified ribonucleotides comprise pseudouridine.

[0017] In some embodiments, the polyribonucleotide comprises or consists of a ribonucleic acid sequence according to SEQ ID NO: 1000. In some embodiments, the polyribonucleotide comprises or consists of a ribonucleic acid sequence according to SEQ ID NO: 1048. In some embodiments, the polyribonucleotide comprises or consists of a ribonucleic acid sequence according to SEQ ID NO: 1096. In some embodiments, the polyribonucleotide comprises or consists of a ribonucleic acid sequence according to SEQ ID NO: 1144.

[0018] In another aspect, the present disclosure provides, a polyribonucleotide comprising or consisting of a ribonucleic acid sequence according to any one of SEQ ID NOs: 1000, 1048, 1096, or 1044.

[0019] The present disclosure also provides, in one aspect, a composition comprising one or more polyribonucleotides described herein. In some embodiments, the composition further comprises lipid nanoparticles, polyplexes (PLX), lipidated polyplexes (LPLX), or liposomes, wherein the one or more polyribonucleotides are fully or partially encapsulated within the lipid nanoparticles, polyplexes (PLX), lipidated polyplexes (LPLX), or liposomes. In some embodiments, the composition further comprises lipid nanoparticles, wherein the one or more polyribonucleotides are encapsulated within the lipid nanoparticles. In some embodiments, the lipid nanoparticles are cationic lipid nanoparticles.

[0020] The present disclosure provides, in another aspect, a pharmaceutical composition comprising the composition of any one of claims 53-56 and at least one pharmaceutically acceptable excipient. In some embodiments, the pharmaceutical composition is used in the treatment and/or prevention of HIV comprising administering the pharmaceutical composition to a subject.

[0021] The present disclosure provides, in another aspect, a method comprising administering the pharmaceutical composition described herein to a subject.

[0022] In some embodiments, administering the pharmaceutical composition to the subject results in expression of the antibody agent in the subject. In some embodiments, the antibody agent is expressed in the subject at a titer of: (a) at least 1 μg/ml in plasma; or (b) at least 1 μg/ml in serum. In some embodiments, the antibody agent is expressed in the subject at a titer of: (a) at least 10 μg/ml in plasma; or (b) at least 10 μg/ml in serum. In some embodiments, the antibody agent is detectable in serum of a subject for period of time of at least 5 days, at least 10 days, at least 15 days, at least 20 days, at least 25 days, or at least 30 days. In some embodiments, the antibody agent is detectable in serum of a subject for a period of time of at least 30 days.

[0023] In some embodiments, the antibody agent is capable of neutralizing one or more HIV strains when tested in the TZM-bl cell pseudovirus neutralization assay at antibody agent concentrations up to 25 μg/ml. In some embodiments, the antibody agent delivered as a polyribonucleotide has higher neutralization activity of one or more HIV strains compared to an equivalent amount of parental control antibody delivered as a polyribonucleotide, wherein the parental control antibody is an IgG antibody comprising the same VH and VL domain as the antibody agent. In some embodiments, the one of more HIV strains comprises one or more HIV strains selected from ZM53M.PB12, Du156.12, Q769.d22, 0330.v4.c3, R2184.c04, 89-F1_2_25, CAP204_2_00_F6_6, Ce1176_A3, 6980.v0.c31, PVO.4, CAP45, CNE8, T250-4, 3103.v3.c10 and C1080_c3.

[0024] In some embodiments, the subject has or is at risk of developing an HIV infection.

[0025] In some embodiments, the method is a method of treating and/or preventing an HIV infection.

[0026] In some embodiments, the present disclosure also provides use of the composition described herein or the pharmaceutical composition described herein for the treatment and/or prevention of HIV in a subject.

[0027] In some embodiments, the present disclosure provides a method of producing an antibody agent comprising administering to cells the composition described herein, or the pharmaceutical composition described herein so that the cells express and secrete the antibody agent. In some embodiments, the cells are in a subject and the antibody agent is produced at a therapeutically relevant plasma concentration or a therapeutically relevant serum concentration. In some embodiments, the therapeutically relevant plasma concentration or the therapeutically relevant serum concentration is at least 10 μg/ml.

[0028] In one aspect, an immunoglobulin chain comprises a heavy chain variable (VH) domain. In some embodiments, a VH domain comprises a heavy chain complementarity determining region (HCDR)1 comprising an amino acid sequence according to SEQ ID NO: 18, an HCDR2 comprising an amino acid sequence according to SEQ ID NO: 21, and an HCDR3 comprising an amino acid sequence according to SEQ ID NO: 24.

[0029] In some embodiments, a VH domain comprises or consists of an amino acid sequence according to SEQ ID NO: 24. In some embodiments, a VH domain comprises an amino acid sequence having at least 85%, at least 90%, at least 95%, at least 96%, at least 97%, at least 98%, or at least 99% identity to an amino acid sequence according to SEQ ID NO: 36.

[0030] In some embodiments, a polyribonucleotide comprises a VH domain-encoding sequence. In some embodiments, a VH domain-encoding sequence comprises (a) the HCDR1-encoding sequence that comprises or consists of the ribonucleic acid sequence according to SEQ ID NO: 19, (b) the HCDR2-encoding sequence that comprises or consists of the ribonucleic acid sequence according to SEQ ID NO: 22, and (c) the HCDR3-encoding sequence that comprises or consists of the ribonucleic acid sequence according to SEQ ID NO: 25.

[0031] In some embodiments, a VH domain-encoding sequence comprises a ribonucleic acid sequence having at least 85%, at least 90%, at least 95%, at least 96%, at least 97%, at least 98%, or at least 99% identity to a ribonucleic acid sequence according to SEQ ID NO: 37. In some embodiments, a VH domain-encoding sequence comprises or consists of a ribonucleic acid sequence according to SEQ ID NO: 37. In some embodiments, a VH domain-encoding sequence comprises a ribonucleic acid sequence having at least 85%, at least 90%, at least 95%, at least 96%, at least 97%, at least 98%, or at least 99% identity to a ribonucleic acid sequence according to SEQ ID NO: 39. In some embodiments, a VH domain-encoding sequence comprises or consists of a ribonucleic acid sequence according to SEQ ID NO: 41. In some embodiments, a VH domain-encoding sequence comprises a ribonucleic acid sequence having at least 85%, at least 90%, at least 95%, at least 96%, at least 97%, at least 98%, or at least 99% identity to a ribonucleic acid sequence according to SEQ ID NO: 39. In some embodiments, a VH domain-encoding sequence comprises or consists of a ribonucleic acid sequence according to SEQ ID NO: 39.

[0032] In some embodiments, an immunoglobulin chain comprising a VH domain as described herein comprises one or more constant domains. In some embodiments, a VH domain is operably linked to one or more constant domains.

[0033] In some embodiments, an immunoglobulin chain comprising a VH domain as described herein comprises one or more constant domains. In some embodiments, a VH domain is operably linked to one or more constant domains.

[0034] In some embodiments, one or more constant domains comprise a CH2 domain. In some embodiments, a polyribonucleotide comprises a ribonucleic acid sequence that encodes the CH2 domain.

[0035] In some embodiments, one or more constant domains comprise a CH3 domain. In some embodiments, a polyribonucleotide comprises a ribonucleic acid sequence that encodes the CH3 domain.

[0036] In some embodiments, one or more constant domains comprise a hinge domain. In some embodiments, a polyribonucleotide comprises a ribonucleic acid sequence that encodes the hinge domain.

[0037] In some embodiments, one or more constant domains comprise a CH1 domain. In some embodiments, a polyribonucleotide comprises a ribonucleic acid sequence that encodes a CH1 domain.

[0038] In some embodiments, one or more constant domains comprise a CL domain. In some embodiments, a polyribonucleotide comprises a ribonucleic acid sequence that encodes a CL domain.

[0039] In some embodiments, an immunoglobulin chain comprising a VH domain as described herein comprises a CH1 domain, a hinge domain, a CH2 domain, and a CH3 domain.

[0040] In some embodiments, an immunoglobulin chain comprising a VH domain as described herein comprises a CL domain, a hinge domain, a CH2 domain, and a CH3 domain.

[0041] The present disclosure further provides a polyribonucleotide encoding an immunoglobulin chain of an antibody agent, where the immunoglobulin chain comprises a light chain variable (VL) domain.

[0042] In some embodiments, a VL domain comprises (a) a light chain complementarity determining region (LCDR)1 comprising an amino acid sequence according to SEQ ID NO: 27, (b) an LCDR2 comprising an amino acid sequence according to SEQ ID NO: 30, and (c) an LCDR3 comprising an amino acid sequence according to SEQ ID NO: 33.

[0043] In some embodiments, a polyribonucleotide comprises a VL domain-encoding sequence. In some embodiments, a VL domain-encoding sequence comprises (a) an LCDR1-encoding sequence that comprises or consists of a ribonucleic acid sequence according to SEQ ID NO: 28, an LCDR2-encoding sequence that comprises or consists of a ribonucleic acid sequence according to SEQ ID NO: 31, and an LCDR3-encoding sequence that comprises or consists of a ribonucleic acid sequence according to SEQ ID NO: 34.

[0044] In some embodiments, a VL domain comprises or consists of an amino acid sequence according to SEQ ID NO: 43. In some embodiments, a VL domain-encoding sequence comprises or consists of a ribonucleic acid sequence according to SEQ ID NO: 44. In some embodiments, a VL domain-encoding sequence comprises or consists of a ribonucleic acid sequence according to SEQ ID NO: 46.

[0045] In some embodiments, an immunoglobulin chain comprising a VL domain further comprises a constant domain. In some embodiments, a VL domain is operably linked to a constant domain. In some embodiments, a polyribonucleotide comprises a ribonucleic acid sequence that encodes the constant domain.

[0046] In some embodiments, an immunoglobulin chain comprising a VL domain further comprises a CL domain. In some embodiments, a polyribonucleotide comprises a ribonucleic acid sequence that encodes the CL domain. In some embodiments, a CL domain is a kappa constant domain. In some embodiments, a polyribonucleotide comprises a ribonucleic acid sequence that encodes the light chain constant domain.

[0047] In some embodiments, an immunoglobulin chain comprising a VL domain further comprises a CH1 domain. In some embodiments, a polyribonucleotide comprises a ribonucleic acid sequence that encodes the CH1 domain.

[0048] Among other things, the present disclosure provides a polyribonucleotide encoding an immunoglobulin chain of an antibody agent, where the immunoglobulin chain comprises a heavy chain variable (VH) domain and a light chain variable (VL) domain. In some embodiments, VH domain comprises an HCDR1 comprising an amino acid sequence according to SEQ ID NO: 18, an HCDR2 comprising an amino acid sequence according to SEQ ID NO: 21, and an HCDR3 comprising an amino acid sequence according to SEQ ID NO: 24. In some embodiments, a VL domain comprises an LCDR1 comprising an amino acid sequence according to SEQ ID NO: 27, an LCDR2 comprising an amino acid sequence according to SEQ ID NO: 30, and an LCDR3 comprising an amino acid sequence according to SEQ ID NO: 33.

[0049] In some embodiments, a polyribonucleotide comprises a VH domain-encoding sequence and a VL domain-encoding sequence. In some embodiments, a VH domain-encoding sequence comprises an HCDR1-encoding sequence that comprises or consists of the ribonucleic acid sequence according to SEQ ID NO: 19, the HCDR2-encoding sequence that comprises or consists of the ribonucleic acid sequence according to SEQ ID NO: 22, and the HCDR3-encoding sequence that comprises or consists of the ribonucleic acid sequence according to SEQ ID NO: 25. In some embodiments, a VL domain-encoding sequence comprises an LCDR1-encoding sequence that comprises or consists of a ribonucleic acid sequence according to SEQ ID NO: 28, an LCDR2-encoding sequence that comprises or consists of a ribonucleic acid sequence according to SEQ ID NO: 31, and an LCDR3-encoding sequence that comprises or consists of a ribonucleic acid sequence according to SEQ ID NO: 34.

[0050] In some embodiments, an immunoglobulin chain comprises a single chain fragment variable (scFv). In some embodiments, an scFv comprises a VH domain, a linker, and a VL domain.

[0051] In some embodiments, an scFv comprises, in order, a VH domain, a linker, and a VL domain. In some embodiments, an scFv comprises, in order, a VH domain comprising or consisting of an amino acid sequence according to SEQ ID NO: 36, a linker, and a VL domain comprising or consisting of an amino acid sequence according to SEQ ID NO: 43.

[0052] In some embodiments, an scFv comprises, in order, a VL domain, a linker, and a VH domain. In some embodiments, an scFv comprises, in order, a VL domain comprising or consisting of an amino acid sequence according to SEQ ID NO: 43, a linker, and a VH domain comprising or consisting of an amino acid sequence according to SEQ ID NO: 36.

[0053] In some embodiments, a linker comprises an amino acid sequence according to SEQ ID NO: 48. In some embodiments, a polyribonucleotide comprises a ribonucleic acid sequence that encodes the linker and comprises or consists of a sequence according to SEQ ID NO: 49, 51, 53, 55, or 57.

[0054] In some embodiments, a linker comprises an amino acid sequence according to SEQ ID NO: 59. In some embodiments, a polyribonucleotide comprises a ribonucleic acid sequence that encodes the linker and comprises or consists of a sequence according to SEQ ID NO: 60 or 62.

[0055] In some embodiments, an immunoglobulin chain comprising a VH domain and a VL domain as described herein comprises one or more constant domains. In some embodiments, a VH domain and a VL domain are operably linked to one or more constant domains.

[0056] In some embodiments, an immunoglobulin chain comprises one or more constant domains, and a hinge domain is between the scFv and the one or more constant domains.

[0057] In some embodiments, one or more constant domains comprise a CH2 domain. In some embodiments, a polyribonucleotide comprises a ribonucleic acid sequence that encodes the CH2 domain.

[0058] In some embodiments, one or more constant domains comprise a CH3 domain. In some embodiments, a polyribonucleotide comprises a ribonucleic acid sequence that encodes the CH3 domain.

[0059] In some embodiments, one or more constant domains comprise a hinge domain. In some embodiments, a polyribonucleotide comprises a ribonucleic acid sequence that encodes the hinge domain.

[0060] In some embodiments, one or more constant domains comprise a CH1 domain. In some embodiments, a polyribonucleotide comprises a ribonucleic acid sequence that encodes a CH1 domain.

[0061] According to the present disclosure, a CH2 domain of any of the embodiments above can comprise an amino acid sequence having at least 85%, at least 90%, at least 95%, at least 96%, at least 97%, at least 98%, or at least 99% identity to an amino acid sequence according to SEQ ID NO: 53. In some embodiments, a CH2 domain comprises or consists of an amino acid sequence according to SEQ ID NO: 53.

[0062] In some embodiments, a ribonucleic acid sequence that encodes a CH2 domain comprises a ribonucleic acid sequence having at least 85%, at least 90%, at least 95%, at least 96%, at least 97%, at least 98%, or at least 99% identity to a ribonucleic acid sequence according to SEQ ID NO: 96. In some embodiments, a ribonucleic acid sequence that encodes the CH2 domain comprises or consists of a sequence according to SEQ ID NO: 96.

[0063] In some embodiments, a CH2 domain comprises one or more substitution mutations. In some embodiments, one or more substitution mutations in a CH2 domain comprise or consist of G236A, A330L, I332E, or a combination thereof, and wherein the substitution mutation positions are according to EU numbering. In some embodiments, one or more substitution mutations in a CH2 domain comprise or consist of G236A, and wherein the substitution mutation positions are according to EU numbering. In some embodiments, one or more substitution mutations in a CH2 domain comprise or consist of I332E, and wherein the substitution mutation positions are according to EU numbering. In some embodiments, one or more substitution mutations in a CH2 domain comprise or consist of G236A and I332E, and wherein the substitution mutation positions are according to EU numbering. In some embodiments, one or more substitution mutations in a CH2 domain comprise or consist of G236A, A330L, and I332E, and wherein the substitution mutation positions are according to EU numbering.

[0064] In some embodiments, a CH2 domain comprises an amino acid sequence having at least 85%, at least 90%, at least 95%, at least 96%, at least 97%, at least 98%, or at least 99% identity to an amino acid sequence according to SEQ ID NO: 56. In some embodiments, a CH2 domain comprises or consists of an amino acid sequence according to SEQ ID NO: 99. In some embodiments, a CH2 domain comprises an amino acid sequence having at least 85%, at least 90%, at least 95%, at least 96%, at least 97%, at least 98%, or at least 99% identity to an amino acid sequence according to SEQ ID NO: 102. In some embodiments, a CH2 domain comprises or consists of an amino acid sequence according to SEQ ID NO: 102.

[0065] In some embodiments, a polyribonucleotide comprises a ribonucleic acid sequence that encodes a CH2 domain with a ribonucleic acid sequence having at least 85%, at least 90%, at least 95%, at least 96%, at least 97%, at least 98%, or at least 99% identity to a ribonucleic acid sequence according to SEQ ID NO: 100. In some embodiments, a polyribonucleotide comprises a ribonucleic acid sequence that encodes a CH2 domain and comprises or consists of a sequence according to SEQ ID NO: 100. In some embodiments, a polyribonucleotide comprises a ribonucleic acid sequence that encodes a CH2 domain with a ribonucleic acid sequence having at least 85%, at least 90%, at least 95%, at least 96%, at least 97%, at least 98%, or at least 99% identity to a ribonucleic acid sequence according to SEQ ID NO: 103. In some embodiments, a polyribonucleotide comprises a ribonucleic acid sequence that encodes a CH2 domain and comprises or consists of a sequence according to SEQ ID NO: 103.

[0066] In some embodiments, a CH2 domain comprises an amino acid sequence having at least 85%, at least 90%, at least 95%, at least 96%, at least 97%, at least 98%, or at least 99% identity to an amino acid sequence according to SEQ ID NO: 104. In some embodiments, a CH2 domain comprises or consists of an amino acid sequence according to SEQ ID NO: 104.

[0067] In some embodiments, a polyribonucleotide comprises a ribonucleic acid sequence that encodes a CH2 domain and has at least 85%, at least 90%, at least 95%, at least 96%, at least 97%, at least 98%, or at least 99% identity to a ribonucleic acid sequence according to SEQ ID NO: 105. In some embodiments, a polyribonucleotide comprises a ribonucleic acid sequence that encodes a CH2 domain and comprises or consists of a sequence according to SEQ ID NO: 105.

[0068] In some embodiments, a CH2 domain comprises an amino acid sequence having at least 85%, at least 90%, at least 95%, at least 96%, at least 97%, at least 98%, or at least 99% identity to an amino acid sequence according to SEQ ID NO: 107. In some embodiments, a CH2 domain comprises or consists of an amino acid sequence according to SEQ ID NO: 107.

[0069] In some embodiments, a polyribonucleotide comprises a ribonucleic acid sequence that encodes a CH2 domain and has at least 85%, at least 90%, at least 95%, at least 96%, at least 97%, at least 98%, or at least 99% identity to a ribonucleic acid sequence according to SEQ ID NO: 108. In some embodiments, a polyribonucleotide comprises a ribonucleic acid sequence that encodes a CH2 domain and comprises or consists of a sequence according to SEQ ID NO: 108.

[0070] In some embodiments, a CH2 domain comprises an amino acid sequence having at least 85%, at least 90%, at least 95%, at least 96%, at least 97%, at least 98%, or at least 99% identity to an amino acid sequence according to SEQ ID NO: 110. In some embodiments, a CH2 domain comprises or consists of an amino acid sequence according to SEQ ID NO: 110.

[0071] In some embodiments, a polyribonucleotide comprises a ribonucleic acid sequence that encodes the CH2 domain and has at least 85%, at least 90%, at least 95%, at least 96%, at least 97%, at least 98%, or at least 99% identity to a ribonucleic acid sequence according to SEQ ID NO: 111. In some embodiments, a polyribonucleotide comprises a ribonucleic acid sequence that encodes the CH2 domain and comprises or consists of a sequence according to SEQ ID NO: 111.

[0072] According to the present disclosure, a CH3 domain of any of the embodiments above can comprise an amino acid sequence having at least 85%, at least 90%, at least 95%, at least 96%, at least 97%, at least 98%, or at least 99% identity to an amino acid sequence according to SEQ ID NO: 113. In some embodiments, a CH3 domain comprises or consists of an amino acid sequence according to SEQ ID NO: 113.

[0073] In some embodiments, a polyribonucleotide comprises a ribonucleic acid sequence that encodes the CH3 domain and has at least 85%, at least 90%, at least 95%, at least 96%, at least 97%, at least 98%, or at least 99% identity to a ribonucleic acid sequence according to SEQ ID NO: 114. In some embodiments, a polyribonucleotide comprises a ribonucleic acid sequence that encodes the CH3 domain and comprises or consists of a sequence according to SEQ ID NO: 114.

[0074] In some embodiments, a CH3 domain comprises an amino acid sequence having at least 85%, at least 90%, at least 95%, at least 96%, at least 97%, at least 98%, or at least 99% identity to an amino acid sequence according to SEQ ID NO: 131. In some embodiments, a CH3 domain comprises or consists of an amino acid sequence according to SEQ ID NO: 131.

[0075] In some embodiments, a polyribonucleotide comprises a ribonucleic acid sequence that encodes the CH3 domain and has at least 85%, at least 90%, at least 95%, at least 96%, at least 97%, at least 98%, or at least 99% identity to a ribonucleic acid sequence according to SEQ ID NO: 132. In some embodiments, a polyribonucleotide comprises a ribonucleic acid sequence that encodes the CH3 domain and comprises or consists of a sequence according to SEQ ID NO: 132.

[0076] In some embodiments, a CH3 domain comprises one or more substitution mutations. In some embodiments, one or more substitution mutations in a CH3 domain comprise or consist of M428L, N434S, or a combination thereof, and wherein the substitution mutation positions are according to EU numbering.

[0077] In some embodiments, a CH3 domain comprises or consists of an amino acid sequence according to SEQ ID NO: 116. In some embodiments, a polyribonucleotide comprises a ribonucleic acid sequence that encodes the CH3 domain and comprises or consists of a sequence according to SEQ ID NO: 117.

[0078] In some embodiments, a CH3 domain comprises an amino acid sequence having at least 85%, at least 90%, at least 95%, at least 96%, at least 97%, at least 98%, or at least 99% identity to an amino acid sequence according to SEQ ID NO: 134. In some embodiments, a CH3 domain comprises or consists of an amino acid sequence according to SEQ ID NO: 134.

[0079] In some embodiments, a polyribonucleotide comprises a ribonucleic acid sequence that encodes the CH3 domain and has at least 85%, at least 90%, at least 95%, at least 96%, at least 97%, at least 98%, or at least 99% identity to a ribonucleic acid sequence according to SEQ ID NO: 135. In some embodiments, a polyribonucleotide comprises a ribonucleic acid sequence that encodes the CH3 domain and comprises or consists of a sequence according to SEQ ID NO: 135.

[0080] In some embodiments, one or more substitution mutations in a CH3 domain comprise or consist of Y349C, T366S, L368A, Y407V, or a combination thereof, and wherein the substitution mutation positions are according to EU numbering. In some embodiments, one or more substitution mutations in a CH3 domain comprise or consist of Y349C, T366S, L368A, Y407V, M428L, N434S, or a combination thereof, and wherein the substitution mutation positions are according to EU numbering. In some embodiments, one or more substitution mutations in a CH3 domain comprise or consist of Y349C, T366S, L368A, Y407V, M428L, and N434S, and wherein the substitution mutation positions are according to EU numbering.

[0081] In some embodiments, a CH3 domain comprises an amino acid sequence having at least 85%, at least 90%, at least 95%, at least 96%, at least 97%, at least 98%, or at least 99% identity to an amino acid sequence according to SEQ ID NO: 122. In some embodiments, a CH3 domain comprises or consists of an amino acid sequence according to SEQ ID NO: 122.

[0082] In some embodiments, a polyribonucleotide comprises a ribonucleic acid sequence that encodes the CH3 domain and has at least 85%, at least 90%, at least 95%, at least 96%, at least 97%, at least 98%, or at least 99% identity to a ribonucleic acid sequence according to SEQ ID NO: 123. In some embodiments, a polyribonucleotide comprises a ribonucleic acid sequence that encodes the CH3 domain and comprises or consists of a sequence according to SEQ ID NO: 123.

[0083] In some embodiments, a CH3 domain comprises an amino acid sequence having at least 85%, at least 90%, at least 95%, at least 96%, at least 97%, at least 98%, or at least 99% identity to an amino acid sequence according to SEQ ID NO: 140. In some embodiments, a CH3 domain comprises or consists of an amino acid sequence according to SEQ ID NO: 140.

[0084] In some embodiments, a polyribonucleotide comprises a ribonucleic acid sequence that encodes the CH3 domain and has at least 85%, at least 90%, at least 95%, at least 96%, at least 97%, at least 98%, or at least 99% identity to a ribonucleic acid sequence according to SEQ ID NO: 141. In some embodiments, a polyribonucleotide comprises a ribonucleic acid sequence that encodes the CH3 domain and comprises or consists of a sequence according to SEQ ID NO: 141.

[0085] In some embodiments, one or more substitution mutations in a CH3 domain comprise or consist of S354C, T366W, or a combination thereof, and wherein the substitution mutation positions are according to EU numbering. In some embodiments, one or more substitution mutations in a CH3 domain comprise or consist of S354C, T366W, M428L, N434S, or a combination thereof, and wherein the substitution mutation positions are according to EU numbering. In some embodiments, one or more substitution mutations in a CH3 domain comprise or consist of S354C, T366W, M428L, and N434S, and wherein the substitution mutation positions are according to EU numbering.

[0086] In some embodiments, a CH3 domain comprises an amino acid sequence having at least 85%, at least 90%, at least 95%, at least 96%, at least 97%, at least 98%, or at least 99% identity to an amino acid sequence according to SEQ ID NO: 128. In some embodiments, a CH3 domain comprises or consists of an amino acid sequence according to SEQ ID NO: 128.

[0087] In some embodiments, a polyribonucleotide comprises a ribonucleic acid sequence that encodes the CH3 domain and has at least 85%, at least 90%, at least 95%, at least 96%, at least 97%, at least 98%, or at least 99% identity to a ribonucleic acid sequence according to SEQ ID NO: 129. In some embodiments, a polyribonucleotide comprises a ribonucleic acid sequence that encodes the CH3 domain and comprises or consists of a sequence according to SEQ ID NO: 129.

[0088] In some embodiments, a CH3 domain comprises an amino acid sequence having at least 85%, at least 90%, at least 95%, at least 96%, at least 97%, at least 98%, or at least 99% identity to an amino acid sequence according to SEQ ID NO: 146. In some embodiments, a CH3 domain comprises or consists of an amino acid sequence according to SEQ ID NO: 146.

[0089] In some embodiments, a polyribonucleotide comprises a ribonucleic acid sequence that encodes the CH3 domain and has at least 85%, at least 90%, at least 95%, at least 96%, at least 97%, at least 98%, or at least 99% identity to a ribonucleic acid sequence according to SEQ ID NO: 147. In some embodiments, a polyribonucleotide comprises a ribonucleic acid sequence that encodes the CH3 domain and comprises or consists of a sequence according to SEQ ID NO: 147.

[0090] According to the present disclosure, a hinge domain of any of the embodiments above can comprise an amino acid sequence having at least 85%, at least 90%, at least 95%, at least 96%, at least 97%, at least 98%, or at least 99% identity to an amino acid sequence according to SEQ ID NO: 161. In some embodiments, a hinge domain comprises or consists of an amino acid sequence according to SEQ ID NO: 161.

[0091] In some embodiments, a polyribonucleotide comprises a ribonucleic acid sequence that encodes the hinge domain and has at least 85%, at least 90%, at least 95%, at least 96%, at least 97%, at least 98%, or at least 99% identity to a ribonucleic acid sequence according to SEQ ID NO: 162. In some embodiments, a polyribonucleotide comprises a ribonucleic acid sequence that encodes the hinge domain and comprises or consists of a sequence according to SEQ ID NO: 162.

[0092] In some embodiments, a hinge domain comprises an amino acid sequence having at least 85%, at least 90%, at least 95%, at least 96%, at least 97%, at least 98%, or at least 99% identity to an amino acid sequence according to SEQ ID NO: 164. In some embodiments, a hinge domain comprises or consists of an amino acid sequence according to SEQ ID NO: 164.

[0093] In some embodiments, a polyribonucleotide comprises a ribonucleic acid sequence that encodes the hinge domain and has at least 85%, at least 90%, at least 95%, at least 96%, at least 97%, at least 98%, or at least 99% identity to a ribonucleic acid sequence according to SEQ ID NO: 165. In some embodiments, a polyribonucleotide comprises a ribonucleic acid sequence that encodes the hinge domain and comprises or consists of a sequence according to SEQ ID NO: 165.

[0094] In some embodiments, a hinge domain comprises an amino acid sequence having at least 85%, at least 90%, at least 95%, at least 96%, at least 97%, at least 98%, or at least 99% identity to an amino acid sequence according to SEQ ID NO: 167. In some embodiments, a hinge domain comprises or consists of an amino acid sequence according to SEQ ID NO: 167.

[0095] In some embodiments, a polyribonucleotide comprises a ribonucleic acid sequence that encodes the hinge domain and has at least 85%, at least 90%, at least 95%, at least 96%, at least 97%, at least 98%, or at least 99% identity to a ribonucleic acid sequence according to SEQ ID NO: 168. In some embodiments, a polyribonucleotide comprises a ribonucleic acid sequence that encodes the hinge domain and comprises or consists of a sequence according to SEQ ID NO: 168.

[0096] According to the present disclosure, a CH1 domain of any of the embodiments above can comprise an amino acid sequence having at least 85%, at least 90%, at least 95%, at least 96%, at least 97%, at least 98%, or at least 99% identity to an amino acid sequence according to SEQ ID NO: 76. In some embodiments, a CH1 domain comprises or consists of an amino acid sequence according to SEQ ID NO: 76.

[0097] In some embodiments, a polyribonucleotide comprises a ribonucleic acid sequence that encodes a CH1 domain and has at least 85%, at least 90%, at least 95%, at least 96%, at least 97%, at least 98%, or at least 99% identity to a ribonucleic acid sequence according to SEQ ID NO: 77. In some embodiments, a polyribonucleotide comprises a ribonucleic acid sequence that encodes a CH1 domain and comprises or consists of a sequence according to SEQ ID NO: 77.

[0098] In some embodiments, a CH1 domain comprises an amino acid sequence having at least 85%, at least 90%, at least 95%, at least 96%, at least 97%, at least 98%, or at least 99% identity to an amino acid sequence according to SEQ ID NO: 81. In some embodiments, a CH1 domain comprises or consists of an amino acid sequence according to SEQ ID NO: 81.

[0099] In some embodiments, a polyribonucleotide comprises a ribonucleic acid sequence that encodes a CH1 domain and has at least 85%, at least 90%, at least 95%, at least 96%, at least 97%, at least 98%, or at least 99% identity to a ribonucleic acid sequence according to SEQ ID NO: 82. In some embodiments, a polyribonucleotide comprises a ribonucleic acid sequence that encodes a CH1 domain and comprises or consists of a sequence according to SEQ ID NO: 82.

[0100] In some embodiments, a CH1 domain comprises one or more substitution mutations. In some embodiments, one or more substitution mutations in a CH1 domain comprise or consist of K147E, K213D, or a combination thereof, and wherein the substitution mutation positions are according to EU numbering.

[0101] In some embodiments, a CH1 domain comprises an amino acid sequence having at least 85%, at least 90%, at least 95%, at least 96%, at least 97%, at least 98%, or at least 99% identity to an amino acid sequence according to SEQ ID NO: 84. In some embodiments, a CH1 domain comprises or consists of an amino acid sequence according to SEQ ID NO: 84.

[0102] In some embodiments, a polyribonucleotide comprises a ribonucleic acid sequence that encodes the CH1 domain and has at least 85%, at least 90%, at least 95%, at least 96%, at least 97%, at least 98%, or at least 99% identity to a ribonucleic acid sequence according to SEQ ID NO: 85. In some embodiments, a polyribonucleotide comprises a ribonucleic acid sequence that encodes the CH1 domain and comprises or consists of a sequence according to SEQ ID NO: 85.

[0103] In some embodiments, a CH1 domain comprises an amino acid sequence having at least 85%, at least 90%, at least 95%, at least 96%, at least 97%, at least 98%, or at least 99% identity to an amino acid sequence according to SEQ ID NO: 76. In some embodiments, a CH1 domain comprises or consists of an amino acid sequence according to SEQ ID NO: 76.

[0104] In some embodiments, a polyribonucleotide comprises a ribonucleic acid sequence that encodes the CH1 domain and has at least 85%, at least 90%, at least 95%, at least 96%, at least 97%, at least 98%, or at least 99% identity to a ribonucleic acid sequence according to SEQ ID NO: 77. In some embodiments, a polyribonucleotide comprises a ribonucleic acid sequence that encodes the CH1 domain and comprises or consists of a sequence according to SEQ ID NO: 77.

[0105] In some embodiments, a CH1 domain comprises an amino acid sequence having at least 85%, at least 90%, at least 95%, at least 96%, at least 97%, at least 98%, or at least 99% identity to an amino acid sequence according to SEQ ID NO: 81. In some embodiments, a CH1 domain comprises or consists of an amino acid sequence according to SEQ ID NO: 81.

[0106] In some embodiments, a polyribonucleotide comprises a ribonucleic acid sequence that encodes the CH1 domain and has at least 85%, at least 90%, at least 95%, at least 96%, at least 97%, at least 98%, or at least 99% identity to a ribonucleic acid sequence according to SEQ ID NO: 82. In some embodiments, a polyribonucleotide comprises a ribonucleic acid sequence that encodes the CH1 domain and comprises or consists of a sequence according to SEQ ID NO: 82.

[0107] According to the present disclosure, a CL domain of any of the embodiments above can comprise an amino acid sequence having at least 85%, at least 90%, at least 95%, at least 96%, at least 97%, at least 98%, or at least 99% identity to an amino acid sequence according to SEQ ID NO: 149. In some embodiments, a CL domain of any of the embodiments above can comprise or consists of an amino acid sequence according to SEQ ID NO: 149.

[0108] In some embodiments, a polyribonucleotide comprises a ribonucleic acid sequence that encodes the CL domain and has at least 85%, at least 90%, at least 95%, at least 96%, at least 97%, at least 98%, or at least 99% identity to a ribonucleic acid sequence according to SEQ ID NO: 150. In some embodiments, a polyribonucleotide comprises a ribonucleic acid sequence that encodes the CL domain and comprises or consists of a sequence according to SEQ ID NO: 150.

[0109] In some embodiments, a polyribonucleotide comprises a ribonucleic acid sequence that encodes the light chain constant domain CL domain comprises one or more substitution mutations. In some embodiments, one or more substitution mutations in a CL domain comprise or consist of Q124E, and wherein the substitution mutation positions are according to EU numbering. In some embodiments, one or more substitution mutations in a CL domain comprise or consist of R108A, T109S, or a combination thereof, and wherein the substitution mutation positions are according to EU numbering. In some embodiments, one or more substitution mutations in a CL domain comprise or consist of R108A, T109S, Q124E or a combination thereof, and wherein the substitution mutation positions are according to EU numbering.

[0110] In some embodiments, a CL domain comprises an amino acid sequence having at least 85%, at least 90%, at least 95%, at least 96%, at least 97%, at least 98%, or at least 99% identity to an amino acid sequence according to SEQ ID NO: 152. In some embodiments, a CL domain comprises or consists of an amino acid sequence according to SEQ ID NO: 152.

[0111] In some embodiments, a polyribonucleotide comprises a ribonucleic acid sequence that encodes the light chain constant domain and has at least 85%, at least 90%, at least 95%, at least 96%, at least 97%, at least 98%, or at least 99% identity to a ribonucleic acid sequence according to SEQ ID NO: 153. In some embodiments, a polyribonucleotide comprises a ribonucleic acid sequence that encodes the light chain constant domain and comprises or consists of a sequence according to SEQ ID NO: 153.

[0112] In some embodiments, a CL domain comprises one or more substitution mutations. In some embodiments, one or more substitution mutations in a CL domain comprise or consist of E123K, Q124R, or a combination thereof, and wherein the substitution mutation positions are according to EU numbering.

[0113] In some embodiments, a CL domain comprises an amino acid sequence having at least 85%, at least 90%, at least 95%, at least 96%, at least 97%, at least 98%, or at least 99% identity to an amino acid sequence according to SEQ ID NO: 155. In some embodiments, a CL domain comprises or consists of an amino acid sequence according to SEQ ID NO: 155.

[0114] In some embodiments, a polyribonucleotide comprises a ribonucleic acid sequence that encodes the light chain constant domain and has at least 85%, at least 90%, at least 95%, at least 96%, at least 97%, at least 98%, or at least 99% identity to a ribonucleic acid sequence according to SEQ ID NO: 156. In some embodiments, a polyribonucleotide comprises a ribonucleic acid sequence that encodes the light chain constant domain and comprises or consists of a sequence according to SEQ ID NO: 156.

[0115] In some embodiments, a one or more substitution mutations in a CL domain comprise or consist of E123R, Q124K, or a combination thereof, and wherein the substitution mutation positions are according to EU numbering.

[0116] In some embodiments, a CL domain comprises an amino acid sequence having at least 85%, at least 90%, at least 95%, at least 96%, at least 97%, at least 98%, or at least 99% identity to an amino acid sequence according to SEQ ID NO: 158. In some embodiments, a CL domain comprises or consists of an amino acid sequence according to SEQ ID NO: 158.

[0117] In some embodiments, a polyribonucleotide comprises a ribonucleic acid sequence that encodes the light chain constant domain and has at least 85%, at least 90%, at least 95%, at least 96%, at least 97%, at least 98%, or at least 99% identity to a ribonucleic acid sequence according to SEQ ID NO: 159. In some embodiments, a polyribonucleotide comprises a ribonucleic acid sequence that encodes the light chain constant domain and comprises or consists of a sequence according to SEQ ID NO: 159.

[0118] In some embodiments, a polyribonucleotide as provided herein encodes an immunoglobulin chain, wherein:
[0119] (i) the polyribonucleotide comprises a ribonucleic acid sequence that encodes a CH2 domain, and the CH2 domain comprises one or more substitution mutations, wherein the one or more substitution mutations comprise or consist of G236A, A330L, I332E, or a combination thereof,
[0120] (ii) the polyribonucleotide comprises a ribonucleic acid sequence that encodes a CH3 domain, and the CH3 domain comprises one or more substitution mutations, wherein the one or more substitution mutations comprise or consist of Y349C, S354C, T366S, T366W, L368A, Y407V, M428L, N434S, or a combination thereof,
[0121] (iii) the polyribonucleotide comprises a ribonucleic acid sequence that encodes a CH1 domain, and the CH1 domain comprises one or more substitution mutations, wherein the one or more substitution mutations comprise or consist of K147E, K213D, or a combination thereof,
[0122] (iv) the polyribonucleotide comprises a ribonucleic acid sequence that encodes a CL domain, and the CL domain comprises one or more substitution mutations, wherein the one or more substitution mutations comprise or consist of R108A, T109S, E123K, E123R, Q124E, Q124K, Q124R, or a combination thereof, or
[0123] (v) a combination thereof;

[0124] wherein the substitution mutation positions are according to EU numbering.

[0125] In some embodiments, a polyribonucleotide as provided herein encodes an immunoglobulin chain that comprises an amino acid sequence having at least 85%, at least 90%, at least 95%, at least 96%, at least 97%, at least 98%, or at least 99% identity to an amino acid sequence according to SEQ ID NO: 1307. In some embodiments, a polyribonucleotide as provided herein encodes an immunoglobulin chain that comprises or consists of an amino acid sequence according to SEQ ID NO: 1307.

[0126] In some embodiments, a polyribonucleotide as provided herein comprises a ribonucleic acid sequence that is at least 85%, at least 90%, at least 95%, at least 96%, at least 97%, at least 98%, or at least 99% identity to a ribonucleic acid sequence according to SEQ ID NO: 1306. In some embodiments, a polyribonucleotide comprises or consists of a ribonucleic acid sequence according to SEQ ID NO: 1306.

[0127] In some embodiments, a polyribonucleotide as provided herein encodes an immunoglobulin chain that comprises an amino acid sequence having at least 85%, at least 90%, at least 95%, at least 96%, at least 97%, at least 98%, or at least 99% identity to an amino acid sequence according to SEQ ID NO: 1310. In some embodiments, a polyribonucleotide as provided herein encodes an immunoglobulin chain that comprises or consists of an amino acid sequence according to SEQ ID NO: 1310.

[0128] In some embodiments, a polyribonucleotide as provided herein comprises a ribonucleic acid sequence that is at least 85%, at least 90%, at least 95%, at least 96%, at least 97%, at least 98%, or at least 99% identical to a ribonucleic acid sequence according to SEQ ID NO: 1309. In some embodiments, a polyribonucleotide as provided herein comprises or consists of a ribonucleic acid sequence according to SEQ ID NO: 1309.

[0129] In some embodiments, a polyribonucleotide as provided herein encodes an immunoglobulin chain that comprises an amino acid sequence having at least 85%, at least 90%, at least 95%, at least 96%, at least 97%, at least 98%, or at least 99% identity to an amino acid sequence according to SEQ ID NO: 1316. In some embodiments, a polyribonucleotide as provided herein encodes an immunoglobulin chain that comprises or consists of an amino acid sequence according to SEQ ID NO: 1316.

[0130] In some embodiments, a polyribonucleotide as provided herein comprises a ribonucleic acid sequence that is at least 85%, at least 90%, at least 95%, at least 96%, at least 97%, at least 98%, or at least 99% identical to a ribonucleic acid sequence according to SEQ ID NO: 1315. In some embodiments, a polyribonucleotide as provided herein comprises or consists of a ribonucleic acid sequence according to SEQ ID NO: 1315.

[0131] In some embodiments, a polyribonucleotide as provided herein encodes an immunoglobulin chain that comprises an amino acid sequence having at least 85%, at least 90%, at least 95%, at least 96%, at least 97%, at least 98%, or at least 99% identity to an amino acid sequence according to SEQ ID NO: 1325. In some embodiments, a polyribonucleotide as provided herein encodes an immunoglobulin chain that comprises or consists of an amino acid sequence according to SEQ ID NO: 1325.

[0132] In some embodiments, a polyribonucleotide as provided herein comprises a ribonucleic acid sequence that is at least 85%, at least 90%, at least 95%, at least 96%, at least 97%, at least 98%, or at least 99% identical to a ribonucleic acid sequence according to SEQ ID NO: 1324. In some embodiments, a polyribonucleotide as provided herein comprises or consists of a ribonucleic acid sequence according to SEQ ID NO: 1324.

[0133] In some embodiments, a polyribonucleotide as provided herein encodes an immunoglobulin chain that comprises an amino acid sequence having at least 85%, at least 90%, at least 95%, at least 96%, at least 97%, at least 98%, or at least 99% identity to an amino acid sequence according to SEQ ID NO: 1319. In some embodiments, a polyribonucleotide as provided herein encodes an immunoglobulin chain that comprises or consists of an amino acid sequence according to SEQ ID NO: 1319.

[0134] In some embodiments, a polyribonucleotide as provided herein comprises a ribonucleic acid sequence that is at least 85%, at least 90%, at least 95%, at least 96%, at least 97%, at least 98%, or at least 99% identical to a ribonucleic acid sequence according to SEQ ID NO: 1318. In some embodiments, a polyribonucleotide as provided herein comprises or consists of a ribonucleic acid sequence according to SEQ ID NO: 1318.

[0135] In some embodiments, a polyribonucleotide as provided herein encodes an immunoglobulin chain that comprises an amino acid sequence having at least 85%, at least 90%, at least 95%, at least 96%, at least 97%, at least 98%, or at least 99% identity to an amino acid sequence according to SEQ ID NO: 1331. In some embodiments, a polyribonucleotide as provided herein encodes an immunoglobulin chain that comprises or consists of an amino acid sequence according to SEQ ID NO: 1331.

[0136] In some embodiments, a polyribonucleotide as provided herein comprises a ribonucleic acid sequence that is at least 85%, at least 90%, at least 95%, at least 96%, at least 97%, at least 98%, or at least 99% identical to a ribonucleic acid sequence according to SEQ ID NO: 1330. In some embodiments, a polyribonucleotide as provided herein comprises or consists of a ribonucleic acid sequence according to SEQ ID NO: 1330.

[0137] In some embodiments, a polyribonucleotide as provided herein encodes an immunoglobulin chain that comprises an amino acid sequence having at least 85%, at least 90%, at least 95%, at least 96%, at least 97%, at least 98%, or at least 99% identity to an amino acid sequence according to SEQ ID NO: 1334. In some embodiments, a polyribonucleotide as provided herein encodes an immunoglobulin chain that comprises or consists of an amino acid sequence according to SEQ ID NO: 1334.

[0138] In some embodiments, a polyribonucleotide as provided herein comprises a ribonucleic acid sequence that is at least 85%, at least 90%, at least 95%, at least 96%, at least 97%, at least 98%, or at least 99% identical to a ribonucleic acid sequence according to SEQ ID NO: 1333. In some embodiments, a polyribonucleotide as provided herein comprises or consists of a ribonucleic acid sequence according to SEQ ID NO: 1333.

[0139] In some embodiments, a polyribonucleotide as provided herein encodes an immunoglobulin chain that comprises an amino acid sequence having at least 85%, at least 90%, at least 95%, at least 96%, at least 97%, at least 98%, or at least 99% identity to an amino acid sequence according to SEQ ID NO: 1337. In some embodiments, a polyribonucleotide as provided herein encodes an immunoglobulin chain that comprises or consists of an amino acid sequence according to SEQ ID NO: 1337.

[0140] In some embodiments, a polyribonucleotide as provided herein comprises a ribonucleic acid sequence that is at least 85%, at least 90%, at least 95%, at least 96%, at least 97%, at least 98%, or at least 99% identical to a ribonucleic acid sequence according to SEQ ID NO: 1336. In some embodiments, a polyribonucleotide as provided herein comprises or consists of a ribonucleic acid sequence according to SEQ ID NO: 1336.

[0141] In some embodiments, a polyribonucleotide as provided herein encodes an immunoglobulin chain that comprises an amino acid sequence having at least 85%, at least 90%, at least 95%, at least 96%, at least 97%, at least 98%, or at least 99% identity to an amino acid sequence according to SEQ ID NO: 1340. In some embodiments, a polyribonucleotide as provided herein encodes an immunoglobulin chain that comprises or consists of an amino acid sequence according to SEQ ID NO: 1340.

[0142] In some embodiments, a polyribonucleotide as provided herein comprises a ribonucleic acid sequence that is at least 85%, at least 90%, at least 95%, at least 96%, at least 97%, at least 98%, or at least 99% identical to a ribonucleic acid sequence according to SEQ ID NO: 1339. In some embodiments, a polyribonucleotide as provided herein comprises or consists of a ribonucleic acid sequence according to SEQ ID NO: 1339.

[0143] In some embodiments, a polyribonucleotide as provided herein encodes an immunoglobulin chain that comprises an amino acid sequence having at least 85%, at least 90%, at least 95%, at least 96%, at least 97%, at least 98%, or at least 99% identity to an amino acid sequence according to SEQ ID NO: 1313. In some embodiments, a polyribonucleotide as provided herein encodes an immunoglobulin chain that comprises or consists of an amino acid sequence according to SEQ ID NO: 1313.

[0144] In some embodiments, a polyribonucleotide as provided herein comprises a ribonucleic acid sequence that is at least 85%, at least 90%, at least 95%, at least 96%, at least 97%, at least 98%, or at least 99% identical to a ribonucleic acid sequence according to SEQ ID NO: 1312. In some embodiments, a polyribonucleotide as provided herein comprises or consists of a ribonucleic acid sequence according to SEQ ID NO: 1312.

[0145] In some embodiments, a polyribonucleotide as provided herein encodes an immunoglobulin chain that comprises an amino acid sequence having at least 85%, at least 90%, at least 95%, at least 96%, at least 97%, at least 98%, or at least 99% identity to an amino acid sequence according to SEQ ID NO: 1328. In some embodiments, a polyribonucleotide as provided herein encodes an immunoglobulin chain that comprises or consists of an amino acid sequence according to SEQ ID NO: 1328.

[0146] In some embodiments, a polyribonucleotide as provided herein comprises a ribonucleic acid sequence that is at least 85%, at least 90%, at least 95%, at least 96%, at least 97%, at least 98%, or at least 99% identical to a ribonucleic acid sequence according to SEQ ID NO: 1327. In some embodiments, a polyribonucleotide as provided herein comprises or consists of a ribonucleic acid sequence according to SEQ ID NO: 1327.

[0147] In some embodiments, a polyribonucleotide as provided herein encodes an immunoglobulin chain that comprises an amino acid sequence having at least 85%, at least 90%, at least 95%, at least 96%, at least 97%, at least 98%, or at least 99% identity to an amino acid sequence according to SEQ ID NO: 1355. In some embodiments, a polyribonucleotide as provided herein encodes an immunoglobulin chain that comprises or consists of an amino acid sequence according to SEQ ID NO: 1355.

[0148] In some embodiments, a polyribonucleotide as provided herein comprises a ribonucleic acid sequence that is at least 85%, at least 90%, at least 95%, at least 96%, at least 97%, at least 98%, or at least 99% identical to a ribonucleic acid sequence according to SEQ ID NO: 1354. In some embodiments, a polyribonucleotide as provided herein polyribonucleotide comprises or consists of a ribonucleic acid sequence according to SEQ ID NO: 1354.

[0149] In some embodiments, a polyribonucleotide as provided herein encodes an immunoglobulin chain that comprises an amino acid sequence having at least 85%, at least 90%, at least 95%, at least 96%, at least 97%, at least 98%, or at least 99% identity to an amino acid sequence according to SEQ ID NO: 1322. In some embodiments, a polyribonucleotide as provided herein encodes an immunoglobulin chain that comprises or consists of an amino acid sequence according to SEQ ID NO: 1322.

[0150] In some embodiments, a polyribonucleotide as provided herein comprises a ribonucleic acid sequence that is at least 85%, at least 90%, at least 95%, at least 96%, at least 97%, at least 98%, or at least 99% identical to a ribonucleic acid sequence according to SEQ ID NO: 1321. In some embodiments, a polyribonucleotide as provided herein comprises or consists of a ribonucleic acid sequence according to SEQ ID NO: 1321.

[0151] In some embodiments, a polyribonucleotide as provided herein encodes an immunoglobulin chain that comprises an amino acid sequence having at least 85%, at least 90%, at least 95%, at least 96%, at least 97%, at least 98%, or at least 99% identity to an amino acid sequence according to SEQ ID NO: 1343. In some embodiments, a polyribonucleotide as provided herein encodes an immunoglobulin chain that comprises or consists of a sequence according to SEQ ID NO: 1343.

[0152] In some embodiments, a polyribonucleotide as provided herein comprises a ribonucleic acid sequence that is at least 85%, at least 90%, at least 95%, at least 96%, at least 97%, at least 98%, or at least 99% identical to a ribonucleic acid sequence according to SEQ ID NO: 1342. In some embodiments, a polyribonucleotide as provided herein comprises or consists of a ribonucleic acid sequence according to SEQ ID NO: 1342.

[0153] In some embodiments, a polyribonucleotide as provided herein encodes an immunoglobulin chain that comprises an amino acid sequence having at least 85%, at least 90%, at least 95%, at least 96%, at least 97%, at least 98%, or at least 99% identity to an amino acid sequence according to SEQ ID NO: 1346. In some embodiments, a polyribonucleotide as provided herein encodes an immunoglobulin chain that comprises or consists of a sequence according to SEQ ID NO: 1346.

[0154] In some embodiments, a polyribonucleotide as provided herein comprises a ribonucleic acid sequence that is at least 85%, at least 90%, at least 95%, at least 96%, at least 97%, at least 98%, or at least 99% identical to a ribonucleic acid sequence according to SEQ ID NO: 1345. In some embodiments, a polyribonucleotide as provided herein comprises or consists of a ribonucleic acid sequence according to SEQ ID NO: 1345.

[0155] In some embodiments, a polyribonucleotide as provided herein encodes an immunoglobulin chain that comprises an amino acid sequence having at least 85%, at least 90%, at least 95%, at least 96%, at least 97%, at least 98%, or at least 99% identity to an amino acid sequence according to SEQ ID NO: 1349. In some embodiments, a polyribonucleotide as provided herein encodes an immunoglobulin chain that comprises or consists of a sequence according to SEQ ID NO: 1349.

[0156] In some embodiments, a polyribonucleotide as provided herein comprises a ribonucleic acid sequence that is at least 85%, at least 90%, at least 95%, at least 96%, at least 97%, at least 98%, or at least 99% identical to a ribonucleic acid sequence according to SEQ ID NO: 1348. In some embodiments, a polyribonucleotide as provided herein comprises or consists of a ribonucleic acid sequence according to SEQ ID NO: 1348.

[0157] In some embodiments, a polyribonucleotide as provided herein encodes an immunoglobulin chain that comprises an amino acid sequence having at least 85%, at least 90%, at least 95%, at least 96%, at least 97%, at least 98%, or at least 99% identity to an amino acid sequence according to SEQ ID NO: 1352. In some embodiments, a polyribonucleotide as provided herein encodes an immunoglobulin chain that comprises or consists of a sequence according to SEQ ID NO: 1362.

[0158] In some embodiments, a polyribonucleotide as provided herein comprises a ribonucleic acid sequence that is at least 85%, at least 90%, at least 95%, at least 96%, at least 97%, at least 98%, or at least 99% identical to a ribonucleic acid sequence according to SEQ ID NO: 1351. In some embodiments, a polyribonucleotide as provided herein comprises or consists of a ribonucleic acid sequence according to SEQ ID NO: 1351.

[0159] In some embodiments, a polyribonucleotide as provided herein encodes an immunoglobulin chain that comprises an amino acid sequence having at least 85%, at least 90%, at least 95%, at least 96%, at least 97%, at least 98%, or at least 99% identity to an amino acid sequence according to SEQ ID NO: 1358, 1361, 1364, 1367, 1370, 1373, 1376, 1379, 1382, 1385, 1388, 1391, 1394, 1397, 1400, 1403, 1406, 1409, 1412, 1415, 1418, 1421, 1424, 1427, 1430, 1433, 1436, 1439, 1442, 1445, 1448, 1451, 1454, 1457, or 1460. In some embodiments, a polyribonucleotide as provided herein encodes an immunoglobulin chain that comprises or consists of a sequence according to SEQ ID NO: 1358, 1361, 1364, 1367, 1370, 1373, 1376, 1379, 1382, 1385, 1388, 1391, 1394, 1397, 1400, 1403, 1406, 1409, 1412, 1415, 1418, 1421, 1424, 1427, 1430, 1433, 1436, 1439, 1442, 1445, 1448, 1451, 1454, 1457, or 1460.

[0160] In some embodiments, a polyribonucleotide as provided herein comprises a ribonucleic acid sequence that is at least 85%, at least 90%, at least 95%, at least 96%, at least 97%, at least 98%, or at least 99% identical to a ribonucleic acid sequence according to SEQ ID NO: 1357, 1360, 1363, 1366, 1369, 1372, 1375, 1378, 1381, 1384, 1387, 1390, 1393, 1396, 1399, 1402, 1405, 1408, 1411, 1414, 1417, 1420, 1423, 1426, 1429, 1432, 1435, 1438, 1441, 1444, 1447, 1450, 1453, 1456, or 1459. In some embodiments, a polyribonucleotide as provided herein comprises or consists of a ribonucleic acid sequence according to SEQ ID NO: 1357, 1360, 1363, 1366, 1369, 1372, 1375, 1378, 1381, 1384, 1387, 1390, 1393, 1396, 1399, 1402, 1405, 1408, 1411, 1414, 1417, 1420, 1423, 1426, 1429, 1432, 1435, 1438, 1441, 1444, 1447, 1450, 1453, 1456, or 1459.

[0161] In some embodiments, a polyribonucleotide comprises a ribonucleic acid sequence encoding a secretion signal.

[0162] In some embodiments, a secretion signal comprises a ribonucleic acid sequence according to SEQ ID NO: 2, 4, 6, or 8.

[0163] In some embodiments, a polyribonucleotide comprises one or more non-coding sequence elements.

[0164] In some embodiments, one or more non-coding sequence elements enhances RNA stability and/or translation efficiency.

[0165] In some embodiments, one or more non-coding sequence elements comprise a 3′ untranslated region (UTR), a 5′ UTR, a 5′-cap, a polyadenine (polyA) tail, or combination thereof.

[0166] In some embodiments, a polyA tail is or comprises a modified polyA sequence, preferably an interrupted polyA tail.

[0167] In some embodiments, a polyA tail comprises or consists of a sequence that is at least 90%, at least 95%, or at least 99% identical to SEQ ID NO: 416.

[0168] In some embodiments, a 3′ UTR comprises or consists of a nucleic acid sequence that is at least 90%, at least 95%, or at least 99% identical to SEQ ID NO: 14.

[0169] In some embodiments, a 5′ UTR comprises or consists of a nucleic acid sequence that is at least 90%, at least 95%, or at least 99% identical to SEQ ID NO: 10.

[0170] In some embodiments, a 5′-cap is (m27,3′-O)Gppp(m2′-O)ApG.

[0171] In some embodiments, a polyribonucleotide comprises one or more modified ribonucleotides. In some embodiments, one or more modified ribonucleotides comprise pseudouridine.

[0172] In some embodiments, a polyribonucleotide comprises a ribonucleic acid sequence that is at least 85%, at least 90%, at least 95%, at least 96%, at least 97%, at least 98%, or at least 99% identical to a ribonucleic acid sequence according to SEQ ID NO: 850. In some embodiments, a polyribonucleotide comprises or consists of a ribonucleic acid sequence according to SEQ ID NO: 850.

[0173] In some embodiments, a polyribonucleotide comprises a ribonucleic acid sequence that is at least 85%, at least 90%, at least 95%, at least 96%, at least 97%, at least 98%, or at least 99% identical to a ribonucleic acid sequence according to SEQ ID NO: 851. In some embodiments, a polyribonucleotide comprises or consists of a ribonucleic acid sequence according to SEQ ID NO: 851.

[0174] In some embodiments, a polyribonucleotide comprises a ribonucleic acid sequence that is at least 85%, at least 90%, at least 95%, at least 96%, at least 97%, at least 98%, or at least 99% identical to a ribonucleic acid sequence according to SEQ ID NO: 853. In some embodiments, a polyribonucleotide comprises or consists of a ribonucleic acid sequence according to SEQ ID NO: 853.

[0175] In some embodiments, a polyribonucleotide comprises a ribonucleic acid sequence that is at least 85%, at least 90%, at least 95%, at least 96%, at least 97%, at least 98%, or at least 99% identical to a ribonucleic acid sequence according to SEQ ID NO: 900. In some embodiments, a polyribonucleotide comprises or consists of a ribonucleic acid sequence according to SEQ ID NO: 900.

[0176] In some embodiments, a polyribonucleotide comprises a ribonucleic acid sequence that is at least 85%, at least 90%, at least 95%, at least 96%, at least 97%, at least 98%, or at least 99% identical to a ribonucleic acid sequence according to SEQ ID NO: 901. In some embodiments, a polyribonucleotide comprises or consists of a ribonucleic acid sequence according to SEQ ID NO: 901.

[0177] In some embodiments, a polyribonucleotide comprises a ribonucleic acid sequence that is at least 85%, at least 90%, at least 95%, at least 96%, at least 97%, at least 98%, or at least 99% identical to a ribonucleic acid sequence according to SEQ ID NO: 905. In some embodiments, a polyribonucleotide comprises or consists of a ribonucleic acid sequence according to SEQ ID NO: 905.

[0178] In some embodiments, a polyribonucleotide comprises a ribonucleic acid sequence that is at least 85%, at least 90%, at least 95%, at least 96%, at least 97%, at least 98%, or at least 99% identical to a ribonucleic acid sequence according to SEQ ID NO: 906. In some embodiments, a polyribonucleotide comprises or consists of a ribonucleic acid sequence according to SEQ ID NO: 906.

[0179] In some embodiments, a polyribonucleotide comprises a ribonucleic acid sequence that is at least 85%, at least 90%, at least 95%, at least 96%, at least 97%, at least 98%, or at least 99% identical to a ribonucleic acid sequence according to SEQ ID NO: 910. In some embodiments, a polyribonucleotide comprises or consists of a ribonucleic acid sequence according to SEQ ID NO: 910.

[0180] In some embodiments, a polyribonucleotide comprises a ribonucleic acid sequence that is at least 85%, at least 90%, at least 95%, at least 96%, at least 97%, at least 98%, or at least 99% identical to a ribonucleic acid sequence according to SEQ ID NO: 950. In some embodiments, a polyribonucleotide comprises or consists of a ribonucleic acid sequence according to SEQ ID NO: 950.

[0181] In some embodiments, a polyribonucleotide comprises a ribonucleic acid sequence that is at least 85%, at least 90%, at least 95%, at least 96%, at least 97%, at least 98%, or at least 99% identical to a ribonucleic acid sequence according to SEQ ID NO: 898. In some embodiments, a polyribonucleotide comprises or consists of a ribonucleic acid sequence according to SEQ ID NO: 898.

[0182] In some embodiments, a polyribonucleotide comprises a ribonucleic acid sequence that is at least 85%, at least 90%, at least 95%, at least 96%, at least 97%, at least 98%, or at least 99% identical to a ribonucleic acid sequence according to SEQ ID NO: 947. In some embodiments, a polyribonucleotide comprises or consists of a ribonucleic acid sequence according to SEQ ID NO: 947.

[0183] In some embodiments, a polyribonucleotide comprises a ribonucleic acid sequence that is at least 85%, at least 90%, at least 95%, at least 96%, at least 97%, at least 98%, or at least 99% identical to a ribonucleic acid sequence according to SEQ ID NO: 997. In some embodiments, a polyribonucleotide comprises or consists of a ribonucleic acid sequence according to SEQ ID NO: 997.

[0184] In some embodiments, a polyribonucleotide comprises a ribonucleic acid sequence that is at least 85%, at least 90%, at least 95%, at least 96%, at least 97%, at least 98%, or at least 99% identical to a ribonucleic acid sequence according to SEQ ID NO: 1000. In some embodiments, a polyribonucleotide comprises or consists of a ribonucleic acid sequence according to SEQ ID NO: 1000.

[0185] In some embodiments, a polyribonucleotide comprises a ribonucleic acid sequence that is at least 85%, at least 90%, at least 95%, at least 96%, at least 97%, at least 98%, or at least 99% identical to a ribonucleic acid sequence according to SEQ ID NO: 1048. In some embodiments, a polyribonucleotide comprises or consists of a ribonucleic acid sequence according to SEQ ID NO: 1048.

[0186] In some embodiments, a polyribonucleotide comprises a ribonucleic acid sequence that is at least 85%, at least 90%, at least 95%, at least 96%, at least 97%, at least 98%, or at least 99% identical to a ribonucleic acid sequence according to SEQ ID NO: 1096. In some embodiments, a polyribonucleotide comprises or consists of a ribonucleic acid sequence according to SEQ ID NO: 1096.

[0187] In some embodiments, a polyribonucleotide comprises a ribonucleic acid sequence that is at least 85%, at least 90%, at least 95%, at least 96%, at least 97%, at least 98%, or at least 99% identical to a ribonucleic acid sequence according to SEQ ID NO: 1144. In some embodiments, a polyribonucleotide comprises or consists of a ribonucleic acid sequence according to SEQ ID NO: 1144.

[0188] In some embodiments, a polyribonucleotide comprises a ribonucleic acid sequence that is at least 85%, at least 90%, at least 95%, at least 96%, at least 97%, at least 98%, or at least 99% identical to a ribonucleic acid sequence according to any one of SEQ ID NOs: 850-1190. In some embodiments, a polyribonucleotide comprises or consists of a ribonucleic acid sequence according to any one of SEQ ID NO: 850-1190.

[0189] In some embodiments, a polyribonucleotide is a non-natural polyribonucleotide.

[0190] In some embodiments, a polyribonucleotide is an engineered polyribonucleotide.

[0191] In some embodiments, a polyribonucleotide is an isolated polyribonucleotide.

[0192] Among other things, the present disclosure provides composition comprising one or more polyribonucleotides as described herein.

[0193] In some embodiments, a composition comprises or consists of a polyribonucleotide encoding an immunoglobulin chain that comprises an amino acid sequence having at least 85%, at least 90%, at least 95%, at least 96%, at least 97%, at least 98%, or at least 99% identity to an amino acid sequence according to SEQ ID NO: 1307 and a polyribonucleotide encoding an immunoglobulin chain that comprises an amino acid sequence having at least 85%, at least 90%, at least 95%, at least 96%, at least 97%, at least 98%, or at least 99% identity to an amino acid sequence according to SEQ ID NO: 1313.

[0194] In some embodiments, a composition comprises or consists of a polyribonucleotide comprises a ribonucleic acid sequence that is at least 85%, at least 90%, at least 95%, at least 96%, at least 97%, at least 98%, or at least 99% identical to a ribonucleic acid sequence according to any one of SEQ ID NO: 1306 and a polyribonucleotide comprises a ribonucleic acid sequence that is at least 85%, at least 90%, at least 95%, at least 96%, at least 97%, at least 98%, or at least 99% identical to a ribonucleic acid sequence according to any one of SEQ ID NO: 1312.

[0195] In some embodiments, a composition comprises or consists of a polyribonucleotide encoding an immunoglobulin chain that comprises an amino acid sequence having at least 85%, at least 90%, at least 95%, at least 96%, at least 97%, at least 98%, or at least 99% identity to an amino acid sequence according to SEQ ID NO: 1310 and a polyribonucleotide encoding an immunoglobulin chain that comprises an amino acid sequence having at least 85%, at least 90%, at least 95%, at least 96%, at least 97%, at least 98%, or at least 99% identity to an amino acid sequence according to SEQ ID NO: 1313.

[0196] In some embodiments, a composition comprises or consists of a polyribonucleotide comprises a ribonucleic acid sequence that is at least 85%, at least 90%, at least 95%, at least 96%, at least 97%, at least 98%, or at least 99% identical to a ribonucleic acid sequence according to any one of SEQ ID NO: 1309 and a polyribonucleotide comprises a ribonucleic acid sequence that is at least 85%, at least 90%, at least 95%, at least 96%, at least 97%, at least 98%, or at least 99% identical to a ribonucleic acid sequence according to any one of SEQ ID NO: 1312.

[0197] In some embodiments, a composition comprises or consists of a polyribonucleotide encoding an immunoglobulin chain that comprises an amino acid sequence having at least 85%, at least 90%, at least 95%, at least 96%, at least 97%, at least 98%, or at least 99% identity to an amino acid sequence according to SEQ ID NO: 1316 and a polyribonucleotide encoding an immunoglobulin chain that comprises an amino acid sequence having at least 85%, at least 90%, at least 95%, at least 96%, at least 97%, at least 98%, or at least 99% identity to an amino acid sequence according to SEQ ID NO: 1313.

[0198] In some embodiments, a composition comprises or consists of a polyribonucleotide comprises a ribonucleic acid sequence that is at least 85%, at least 90%, at least 95%, at least 96%, at least 97%, at least 98%, or at least 99% identical to a ribonucleic acid sequence according to any one of SEQ ID NO: 1315 and a polyribonucleotide comprises a ribonucleic acid sequence that is at least 85%, at least 90%, at least 95%, at least 96%, at least 97%, at least 98%, or at least 99% identical to a ribonucleic acid sequence according to any one of SEQ ID NO: 1312.

[0199] In some embodiments, a composition comprises or consists of a polyribonucleotide encoding an immunoglobulin chain that comprises an amino acid sequence having at least 85%, at least 90%, at least 95%, at least 96%, at least 97%, at least 98%, or at least 99% identity to an amino acid sequence according to SEQ ID NO: 1319 and a polyribonucleotide encoding an immunoglobulin chain that comprises an amino acid sequence having at least 85%, at least 90%, at least 95%, at least 96%, at least 97%, at least 98%, or at least 99% identity to an amino acid sequence according to SEQ ID NO: 1322.

[0200] In some embodiments, a composition comprises or consists of a polyribonucleotide comprises a ribonucleic acid sequence that is at least 85%, at least 90%, at least 95%, at least 96%, at least 97%, at least 98%, or at least 99% identical to a ribonucleic acid sequence according to any one of SEQ ID NO: 1318 and a polyribonucleotide comprises a ribonucleic acid sequence that is at least 85%, at least 90%, at least 95%, at least 96%, at least 97%, at least 98%, or at least 99% identical to a ribonucleic acid sequence according to any one of SEQ ID NO: 1321.

[0201] In some embodiments, a composition comprises or consists of a polyribonucleotide encoding an immunoglobulin chain that comprises an amino acid sequence having at least 85%, at least 90%, at least 95%, at least 96%, at least 97%, at least 98%, or at least 99% identity to an amino acid sequence according to SEQ ID NO: 1331 and a polyribonucleotide encoding an immunoglobulin chain that comprises an amino acid sequence having at least 85%, at least 90%, at least 95%, at least 96%, at least 97%, at least 98%, or at least 99% identity to an amino acid sequence according to SEQ ID NO: 1322.

[0202] In some embodiments, a composition comprises or consists of a polyribonucleotide comprises a ribonucleic acid sequence that is at least 85%, at least 90%, at least 95%, at least 96%, at least 97%, at least 98%, or at least 99% identical to a ribonucleic acid sequence according to any one of SEQ ID NO: 1330 and a polyribonucleotide comprises a ribonucleic acid sequence that is at least 85%, at least 90%, at least 95%, at least 96%, at least 97%, at least 98%, or at least 99% identical to a ribonucleic acid sequence according to any one of SEQ ID NO: 1321.

[0203] In some embodiments, a composition comprises or consists of a polyribonucleotide encoding an immunoglobulin chain that comprises an amino acid sequence having at least 85%, at least 90%, at least 95%, at least 96%, at least 97%, at least 98%, or at least 99% identity to an amino acid sequence according to SEQ ID NO: 1334 and a polyribonucleotide encoding an immunoglobulin chain that comprises an amino acid sequence having at least 85%, at least 90%, at least 95%, at least 96%, at least 97%, at least 98%, or at least 99% identity to an amino acid sequence according to SEQ ID NO: 1322.

[0204] In some embodiments, a composition comprises or consists of a polyribonucleotide comprises a ribonucleic acid sequence that is at least 85%, at least 90%, at least 95%, at least 96%, at least 97%, at least 98%, or at least 99% identical to a ribonucleic acid sequence according to any one of SEQ ID NO: 1333 and a polyribonucleotide comprises a ribonucleic acid sequence that is at least 85%, at least 90%, at least 95%, at least 96%, at least 97%, at least 98%, or at least 99% identical to a ribonucleic acid sequence according to any one of SEQ ID NO: 1321.

[0205] In some embodiments, a composition comprises or consists of a polyribonucleotide encoding an immunoglobulin chain that comprises an amino acid sequence having at least 85%, at least 90%, at least 95%, at least 96%, at least 97%, at least 98%, or at least 99% identity to an amino acid sequence according to SEQ ID NO: 1337 and a polyribonucleotide encoding an immunoglobulin chain that comprises an amino acid sequence having at least 85%, at least 90%, at least 95%, at least 96%, at least 97%, at least 98%, or at least 99% identity to an amino acid sequence according to SEQ ID NO: 1322.

[0206] In some embodiments, a composition comprises or consists of a polyribonucleotide comprises a ribonucleic acid sequence that is at least 85%, at least 90%, at least 95%, at least 96%, at least 97%, at least 98%, or at least 99% identical to a ribonucleic acid sequence according to any one of SEQ ID NO: 1336 and a polyribonucleotide comprises a ribonucleic acid sequence that is at least 85%, at least 90%, at least 95%, at least 96%, at least 97%, at least 98%, or at least 99% identical to a ribonucleic acid sequence according to any one of SEQ ID NO: 1321.

[0207] In some embodiments, a composition comprises or consists of a polyribonucleotide encoding an immunoglobulin chain that comprises an amino acid sequence having at least 85%, at least 90%, at least 95%, at least 96%, at least 97%, at least 98%, or at least 99% identity to an amino acid sequence according to SEQ ID NO: 1340 and a polyribonucleotide encoding an immunoglobulin chain that comprises an amino acid sequence having at least 85%, at least 90%, at least 95%, at least 96%, at least 97%, at least 98%, or at least 99% identity to an amino acid sequence according to SEQ ID NO: 1322.

[0208] In some embodiments, a composition comprises or consists of a polyribonucleotide comprises a ribonucleic acid sequence that is at least 85%, at least 90%, at least 95%, at least 96%, at least 97%, at least 98%, or at least 99% identical to a ribonucleic acid sequence according to any one of SEQ ID NO: 1339 and a polyribonucleotide comprises a ribonucleic acid sequence that is at least 85%, at least 90%, at least 95%, at least 96%, at least 97%, at least 98%, or at least 99% identical to a ribonucleic acid sequence according to any one of SEQ ID NO: 1321.

[0209] In some embodiments, a composition comprises or consists of a polyribonucleotide encoding an immunoglobulin chain that comprises an amino acid sequence having at least 85%, at least 90%, at least 95%, at least 96%, at least 97%, at least 98%, or at least 99% identity to an amino acid sequence according to SEQ ID NO: 1325 and a polyribonucleotide encoding an immunoglobulin chain that comprises an amino acid sequence having at least 85%, at least 90%, at least 95%, at least 96%, at least 97%, at least 98%, or at least 99% identity to an amino acid sequence according to SEQ ID NO: 1328.

[0210] In some embodiments, a composition comprises or consists of a polyribonucleotide comprises a ribonucleic acid sequence that is at least 85%, at least 90%, at least 95%, at least 96%, at least 97%, at least 98%, or at least 99% identical to a ribonucleic acid sequence according to any one of SEQ ID NO: 1324 and a polyribonucleotide comprises a ribonucleic acid sequence that is at least 85%, at least 90%, at least 95%, at least 96%, at least 97%, at least 98%, or at least 99% identical to a ribonucleic acid sequence according to any one of SEQ ID NO: 1327.

[0211] In some embodiments, a composition comprises or consists of a polyribonucleotide encoding an immunoglobulin chain that comprises an amino acid sequence having at least 85%, at least 90%, at least 95%, at least 96%, at least 97%, at least 98%, or at least 99% identity to an amino acid sequence according to SEQ ID NO: 1325 and a polyribonucleotide encoding an immunoglobulin chain that comprises an amino acid sequence having at least 85%, at least 90%, at least 95%, at least 96%, at least 97%, at least 98%, or at least 99% identity to an amino acid sequence according to SEQ ID NO: 1355.

[0212] In some embodiments, a composition comprises or consists of a polyribonucleotide comprises a ribonucleic acid sequence that is at least 85%, at least 90%, at least 95%, at least 96%, at least 97%, at least 98%, or at least 99% identical to a ribonucleic acid sequence according to any one of SEQ ID NO: 1324 and a polyribonucleotide comprises a ribonucleic acid sequence that is at least 85%, at least 90%, at least 95%, at least 96%, at least 97%, at least 98%, or at least 99% identical to a ribonucleic acid sequence according to any one of SEQ ID NO: 1354.

[0213] In some embodiments, a composition further comprises lipid nanoparticles, polyplexes (PLX), lipidated polyplexes (LPLX), or liposomes, where the one or more polyribonucleotides are fully or partially encapsulated within the lipid nanoparticles, polyplexes (PLX), lipidated polyplexes (LPLX), or liposomes.

[0214] In some embodiments, a composition further comprises lipid nanoparticles, where the one or more polyribonucleotides are encapsulated within the lipid nanoparticles.

[0215] In some embodiments, lipid nanoparticles target liver cells.

[0216] In some embodiments, lipid nanoparticles target secondary lymphoid organ cells.

[0217] In some embodiments, lipid nanoparticles target lung cells.

[0218] In some embodiments, lipid nanoparticles are cationic lipid nanoparticles.

[0219] In some embodiments, lipid nanoparticles each comprise a polymer-conjugated lipid, a cationic lipid, and one or more neutral lipids.

[0220] In some embodiments, a polymer-conjugated lipid comprises a PEG-conjugated lipid.

[0221] In some embodiments, a polymer-conjugated lipid comprises 2-[(polyethylene glycol)-2000]-N,N-ditetradecylacetamide.

[0222] In some embodiments, one or more neutral lipids comprise 1,2-Distearoyl-sn-glycero-3-phosphocholine (DPSC).

[0223] In some embodiments, one or more neutral lipids comprise cholesterol.

[0224] In some embodiments, a cationic lipid comprises ((3-hydroxypropyl)azanediyl)bis(nonane-9,1-diyl) bis(2-butyloctanoate).

[0225] In some embodiments, lipid nanoparticles each comprise 2-[(polyethylene glycol)-2000]-N,N-ditetradecylacetamide, DPSC, cholesterol, and ((3-hydroxypropyl)azanediyl)bis(nonane-9,1-diyl) bis(2-butyloctanoate).

[0226] In some embodiments, lipid nanoparticles comprise the polymer-conjugated lipid at about 1-2.5 mol % of the total lipids, the cationic lipid at 35-65 mol % of the total lipids, and the one or more neutral lipids are present in 35-65 mol % of the total lipids.

[0227] In some embodiments, lipid nanoparticles have an average diameter of about 50-150 nm.

[0228] The present disclosure also provides pharmaceutical compositions. In some embodiments, a pharmaceutical composition comprises a composition provided herein and at least one pharmaceutically acceptable excipient.

[0229] In some embodiments, a pharmaceutical comprises a cryoprotectant. In some embodiments, a pharmaceutical comprises an aqueous buffered solution.

[0230] Among other things, the present disclosure provides methods.

[0231] In some embodiments, a method comprises administering a pharmaceutical composition provided herein to a subject.

[0232] In some embodiments, a pharmaceutical composition provided herein is for use in the treatment of HIV comprising administering the pharmaceutical composition to a subject.

[0233] In some embodiments, a pharmaceutical composition provided herein is for use in the prevention of HIV comprising administering the pharmaceutical composition to a subject.

[0234] In some embodiments, a method or pharmaceutical composition for use provided herein, comprises administering the pharmaceutical composition to the subject, which results in expression in the subject of an immunoglobulin chain of antibody agent, an antibody agent, or both.

[0235] In some embodiments, an immunoglobulin chain of antibody agent, the antibody agent, or both is expressed in the subject at a titer of at least 1 μg/ml in plasma or serum.

[0236] In some embodiments, an antibody agent exhibits a geometric mean IC50 of five neutralized strains of less than 0.3 μg/ml against the neutralized strains of a global reference panel when tested in the TZM-bl cell pseudovirus neutralization assay at antibody agent concentrations up to 25 μg/ml.

[0237] In some embodiments, an antibody agent is capable of neutralizing one or more HIV strains when tested in the TZM-bl cell pseudovirus neutralization assay at antibody agent concentrations up to 25 μg/ml.

[0238] In some embodiments, an antibody agent is capable of neutralizing one or more HIV strains at a level that is within 3-fold of a level of an equivalent amount of recombinant benchmark antibody.

[0239] In some embodiments, a recombinant benchmark antibody is an unmodified wild-type IgG antibody comprising the same HCDR1, HCDR2, HCDR2, LCDR1, LCDR2, and LCDR3 as the antibody agent.

[0240] In some embodiments, administering the pharmaceutical composition to the subject comprises administering one or more doses of the pharmaceutical composition to the subject. In some embodiments, one or more doses of the pharmaceutical composition are administered to the subject weekly. In some embodiments, one or more doses of the pharmaceutical composition are administered to the subject bi-weekly.

[0241] In some embodiments, a pharmaceutical composition is administered intravenously. In some embodiments, a pharmaceutical composition is administered intramuscularly. In some embodiments, a pharmaceutical composition is administered subcutaneously.

[0242] In some embodiments, a subject has or is at risk of developing an HIV infection.

[0243] In some embodiments, a method is a method of treating an HIV infection.

[0244] In some embodiments, a method is a method of preventing an HIV infection.

[0245] Also provided herein are uses of polyribonucleotides, compositions, and pharmaceutical compositions described herein.

[0246] In some embodiments, provided are uses of a composition or pharmaceutical composition as provided herein for the treatment of HIV in a subject.

[0247] In some embodiments, provided are uses of a composition or pharmaceutical composition as provided herein for the prevention of HIV in a subject.

[0248] In some embodiments, a subject has or is at risk of developing an HIV infection.

[0249] Further, the present disclosure provides methods of producing an antibody agent. In some embodiments, a method comprises administering to cells a composition or pharmaceutical composition as provided herein so that the cells express and secrete the antibody agent.

[0250] In some embodiments, cells are liver cells.

[0251] In some embodiments, cells are in a subject.

[0252] In some embodiments, cells are ex vivo cells.

[0253] In some embodiments, an antibody agent is produced at a therapeutically relevant plasma concentration or a therapeutically relevant serum concentration. In some embodiments, therapeutically relevant plasma concentration or the therapeutically relevant serum concentration is at least 1 μg/ml.

[0254] The present disclosure further provides methods of determining one or more features of an antibody agent expressed from a polyribonucleotide, a composition or a pharmaceutical composition provided herein. In some embodiments, a polyribonucleotide, a composition or a pharmaceutical composition provided herein are introduced into cells. In some embodiments, one or more features comprises: (i) protein expression level of the antibody agent; (ii) binding specificity of the antibody agent to the Apex binding site of HIV; (iii) efficacy of the antibody agent to mediate target cell death through antibody-dependent cellular cytotoxicity (ADCC); and (iv) efficacy of the antibody agent to mediate target cell death through complement dependent cytotoxicity (CDC).

[0255] The present disclosure further provides methods comprising contacting cells with a polyribonucleotide, a composition or a pharmaceutical composition provided herein. In some embodiments, a method further comprises detecting the antibody agent produced by the cells.

[0256] In some embodiments, cells are liver cells.

[0257] In some embodiments, the step of determining comprises comparing the one or more features of the antibody agent with that of a reference antibody that specifically binds to a Apex binding site of HIV.

[0258] In some embodiments, the step of determining comprises assessing the protein expression level of the antibody agent above a threshold level.

[0259] In some embodiments, a threshold level is a level that is sufficient to induce ADCC.

[0260] In some embodiments, the step of determining comprises assessing binding of the antibody agent to a Apex (e.g., the V1V2 region) binding site of HIV.

[0261] In some embodiments, the step of determining comprises assessing the antibody agent in the TZM-bl cell pseudovirus neutralization assay at antibody agent concentrations up to 25 μg/ml.

[0262] In some embodiments, cells are present in a subject.

[0263] In some embodiments, cells are ex vivo cells.

[0264] In some embodiments, one or more features include antibody level in one or more tissues in the subject.

[0265] The present disclosure also provides methods of manufacture. In some embodiments, a method comprises (A) determining one or more features of a polyribonucleotide, a composition or a pharmaceutical composition provided herein, which one or more features comprise or consist of:
[0266] (i) length and/or sequence of the polyribonucleotide;
[0267] (ii) integrity of the polyribonucleotide;
[0268] (iii) presence and/or location of one or more chemical moieties of the polyribonucleotide;
[0269] (iv) extent of expression of the antibody agent when the polyribonucleotide is introduced into a cell;
[0270] (v) stability of the polyribonucleotide or composition thereof;
[0271] (vi) level of antibody agent in a biological sample from an organism into which the polyribonucleotide has been introduced;
[0272] (vii) binding specificity of the antibody agent expressed from the polyribonucleotide, optionally to a CD4 binding site of HIV;
[0273] (viii) efficacy of the antibody agent to mediate target cell death through ADCC;
[0274] (ix) efficacy of the antibody agent to mediate target cell death through complement dependent cytotoxicity (CDC);
[0275] (x) lipid identity and amount/concentration within the composition;
[0276] (xi) size of lipid nanoparticles within the composition;
[0277] (xii) polydispersity of lipid nanoparticles within the composition;
[0278] (xiii) amount/concentration of the polyribonucleotide within the composition;
[0279] (xiv) extent of encapsulation of the polyribonucleotide within lipid nanoparticles;
[0280] (xv) a level of double stranded RNA; and
[0281] (xvi) combinations thereof;
   [0282] (B) comparing the one or more features of the polyribonucleotide with that of an appropriate reference standard; and
   [0283] (C) (i) designating the polyribonucleotide or composition thereof for one or more further steps of manufacturing and/or distribution if the comparison demonstrates that the polyribonucleotide or composition thereof meets or exceeds the reference standard; or
   [0284] (C) (ii) taking an alternative action if the comparison demonstrates that the polyribonucleotide or composition thereof does not meet or exceed the reference standard.

[0285] In some embodiments, a polyribonucleotide is assessed and the one or more further steps of step (C)(i) are or comprise at least formulation of the polyribonucleotide.

[0286] In some embodiments, a composition or the pharmaceutical composition is assessed, and the one or more further steps of step (C)(i) are or comprise release and distribution of the composition or the pharmaceutical composition.

[0287] The present disclosure thus provides technologies that allow for multiple anti-HIV antibodies to be expressed in a subject, increasing the breadth and potency of the anti-HIV antibodies present in a subject at one time and decreasing the likelihood of viral escape.

[0288] Provide technologies, including exemplary polyribonucleotides, compositions comprising such polyribonucleotides, and methods of making and using such polyribonucleotides, are described in more detail herein.

### BRIEF DESCRIPTION OF THE DRAWING

[0289] FIG. 1 shows a schematic of the HIV genome (Panel A) and the structure of a HIV virion particle (Panel B). Drawings modified from Musumeci et al., 2015 Molecules, which is incorporated herein by reference in its entirety.

[0290] FIG. 2 shows potential epitope regions on an HIV virion particle to which an antibody agent (e.g., a broadly neutralizing antibody (bNAb) or variant thereof) can bind. Drawings modified from McCoy and Burton, 2017 Immunol Rev., which is incorporated herein by reference in its entirety.

[0291] FIG. 3 shows an exemplary therapeutic strategy utilizing RiboMab technology as described herein for delivery and expression of anti-HIV RibobNabs.

[0292] FIG. 4 shows exemplary formats of PGDM1400 RibobNabs as described herein. Exemplary formats may include IgG (Panel A), CrossMab^{CH1-CLx}, (Panel B), CrossMab^{CH1-CLv}, (Panel D), or various orientations/linkers of scFv-Fc RibobNAbs (Panel C and Panel E).

[0293] FIG. 5 shows exemplary Fc modifications of PGDM1400 RibobNabs as described herein. Exemplary RiboMab formats may include an unmodified Fc domain (Panel A), or modifications shown in Panels B-D, including GAALIE/GAIE/GA/IE (Panel B), L/S, (Panel D), and/or knob-into-holes RibobNAbs (Panel C).

[0294] FIG. 6 shows schematics of exemplary polyribonucleotides which encode a heavy chain (Panel A) and a light chain (Panel B) of an exemplary PGDM1400 IgG1 antibody agent.

[0295] FIG. 7 shows % breadth and potency of various broadly neutralizing antibodies to HIV, including PGDM1400, as tested against a panel of 109 pseudoviruses.

[0296] FIG. 8 shows schematics of exemplary polyribonucleotides which encode scFv-Fc PGDM1400 antibody agents: PGDM1400 scFV-Fc VH-LL4/5-VL (Panel A) and PGDM1400 scFV-Fc VL-LL4/5-VH (Panel B).

[0297] FIG. 9 shows schematics of exemplary polyribonucleotides which encode heavy chain (Panel A) and light chain (Panel B) of an exemplary PGDM1400 CrossMab^{CH1-CLx} antibody agent.

[0298] FIG. 10 shows schematics of exemplary polyribonucleotides which encode heavy chain (Panel A) and light chain (Panel B) of an exemplary PGDM1400 CrossMab^{CH1-CLcv} antibody agent.

[0299] FIG. 11 shows exemplary concentrations of PGDM1400 and PGDM1400 L/S RibobNAbs compared to a control RiboMab as determined by Gyros ELISA from Example 5.

[0300] FIG. 12 shows exemplary Western Blot analysis of PGDM1400 and PGDM1400 L/S RibobNAbs compared to a control RiboMab under nonreducing conditions from Example 5.

[0301] FIG. 13 shows exemplary concentrations of scFv-Fc PGDM1400 L/S RibobNAbs (e.g., VH-LL4-VL, VL-LL5-VH, VH-LL5-VL, and VL-LL4-VH) compared to an IgG control RiboMab and a parental IgG as determined by Gyros ELISA from Example 6.

[0302] FIG. 14 shows exemplary Western Blot analysis of scFv-Fc PGDM1400 L/S RibobNAbs (e.g., VH-LL4-VL, VL-LL5-VH, VH-LL5-VL, and VL-LL4-VH) compared to a control RiboMab and a parental IgG under nonreducing conditions from Example 6.

[0303] FIG. 15 shows exemplary concentrations of CrossMab PGDM1400 L/S RibobNAbs (e.g., CrossMab^{CH1-CLcv} and CrossMab^{CH1-CLx}) compared to a control RiboMab and a parental Ab as determined by Gyros ELISA from Example 7.

[0304] FIG. 16 shows exemplary Western Blot analysis of CrossMab PGDM1400 L/S RibobNAbs (e.g., CrossMab^{CH1-CLcv} and CrossMab^{CH1-CLx}) compared to a control RiboMab and a parental Ab from Example 7.

[0305] FIG. 17 shows exemplary pharmacokinetic (PK) profiles of of PGDM1400 IgG and PGDM1400 IgG L/S RibobNAbs compared to a control RiboMab as determined by Gyros ELISA from Example 8 in NSG mice (panel A) and NSG Tg32 mice (panel B). Quantification of PGDM1400 RibobNAbs was performed using sera obtained from NSG mice and hFcRn NSG Tg32 mice. The in vivo concentrations in μg/mL are shown in log scale on the y-axis. The x-axis shows the time in days of the respective blood sampling.

[0306] FIG. 18 shows exemplary pharmacokinetic (PK) profiles of PGDM1400 IgG, IgG L/S and scFv-Fc L/S RibobNAbs. Quantification of PGDM1400 RibobNAbs was performed using sera obtained from hFcRn NSG Tg32 mice. The in vivo concentrations in μg/mL are shown in log scale on the y-axis. The x-axis shows the time in days of the respective blood sampling. Results of PGDM1400 VL-LL5-VH L/S scFv-Fc are depicted in comparison to PGDM1400 IgG and PGDM1400 L/S IgG RibobNAbs as determined by Gyros ELISA from Example 12. Two different doses of the PGDM1400 VL-LL5-VH L/S scFv-Fc (30 μg and 19.56 μg) and PGDM1400 L/S IgG (30 μg and 10 μg) were analyzed.

[0307] FIG. 19 shows exemplary results from a pseudovirus viral neutralization test (pVNT) where TZM.b1 cells were exposed to PGDM1400 scFv-Fc L/S (VH-LL4-VL, VL-LL5-VH, VH-LL5-VL, and VL-LL4-VH configurations) and pseudoviruses ZM53M.PB12, Du156.12, Q769.d22, 0330.v4.c3, R2184.c04, and 89-F1_2_25. A Murine Leukemia Virus (MuLV) pseudovirus was used as a negative control. Results are expressed as IC50 and IC80 values or antibody/IgG concentrations resulting in a 50% and 80% reduction in relative luminescence units (RLUs) compared to untreated virus control wells.

[0308] FIG. 20 shows exemplary results from pVNT where TZM.b1 cells were exposed to PGDM1400 scFv-Fc L/S (VH-LL4-VL, VH-LL5-VL, VL-LL4-VH, and VL-LL5-VH configurations) and pseudoviruses CAP304_2_00_F6_6, Ce1176_A3, 6980.v0.c31, 1012_11_TC21_3257, and PVO.4. A Murine Leukemia Virus (MuLV) pseudovirus was used as a negative control. Results are expressed as IC50 and IC80 values or antibody/IgG concentrations resulting in a 50% and 80% reduction in relative luminescence units (RLUs) compared to untreated virus control wells.

[0309] FIG. 21 shows exemplary results from pVNT where TZM.b1 cells were exposed to PGDM1400 CrossMab^{CH1-CLx} L/S and PGDM1400 CrossMab^{CH1-CHcv} L/S RibobNAbs and pseudoviruses ZM53M.PB12, Du156.12, Q769.d22, 0330.v4.c3, R2184.c04, and 89-F1_2_25. A Murine Leukemia Virus (MuLV) pseudovirus was used as a negative control. Results are expressed as IC50 and IC80 values or antibody/IgG concentrations resulting in a 50% and 80% reduction in relative luminescence units (RLUs) compared to untreated virus control wells.

[0310] FIG. 22 shows exemplary results from pVNT where TZM.b1 cells were exposed to PGDM1400 scFv-Fc (VL-LL5-VH) L/S RibobNAbs and pseudoviruses CAP45, X2088_c9, CNE8, T250-4, QH0692.42, and 3103.v3.c10 (panel A) and C1080_c3, T278-50, ZM109F.PB4, and Du156.12 (panel B). A Murine Leukemia Virus (MuLV) pseudovirus was used as a negative control. Results are expressed as IC50 and IC80 values or antibody/IgG concentrations resulting in a 50% and 80% reduction in relative luminescence units (RLUs) compared to untreated virus control wells.

### DEFINITIONS

[0311] Compounds of this disclosure include those described generally above and are further illustrated by the classes, subclasses, and species disclosed herein. As used herein, the following definitions shall apply unless otherwise indicated. For purposes of this disclosure, the chemical elements are identified in accordance with the Periodic Table of Elements, CAS version, Handbook of Chemistry and Physics, 75th Ed. Additionally, general principles of organic chemistry are described in “Organic Chemistry”, Thomas Sorrell, University Science Books, Sausalito: 1999, and “March's Advanced Organic Chemistry”, 5th Ed., Ed.: Smith, M. B. and March, J., John Wiley & Sons, New York: 2001, the entire contents of which are hereby incorporated by reference.

[0312] Unless otherwise stated, structures depicted herein are meant to include all stereoisomeric (e.g., enantiomeric or diastereomeric) forms of the structure, as well as all geometric or conformational isomeric forms of the structure. For example, the R and S configurations of each stereocenter are contemplated as part of the disclosure. Therefore, single stereochemical isomers, as well as enantiomeric, diastereomeric, and geometric (or conformational) mixtures of provided compounds are within the scope of the disclosure. For example, in some cases, provided compounds show one or more stereoisomers of a compound, and unless otherwise indicated, represents each stereoisomer alone and/or as a mixture. Unless otherwise stated, all tautomeric forms of provided compounds are within the scope of the disclosure.

[0313] Unless otherwise indicated, structures depicted herein are meant to include compounds that differ only in the presence of one or more isotopically enriched atoms. For example, compounds having the present structures including replacement of hydrogen by deuterium or tritium, or replacement of a carbon by 13C- or 14C-enriched carbon are within the scope of this disclosure.

[0314] About. The term “about”, when used herein in reference to a value, refers to a value that is similar, in context to the referenced value. In general, those skilled in the art, familiar with the context, will appreciate the relevant degree of variance encompassed by “about” in that context. For example, in some embodiments, the term “about” may encompass a range of values that within 25%, 20%, 19%, 18%, 17%, 16%, 15%, 14%, 13%, 12%, 11%, 10%, 9%, 8%, 7%, 6%, 5%, 4%, 3%, 2%, 1%, or less of the referred value.

[0315] Agent. As used herein, the term “agent,” may refer to a physical entity. In some embodiments, an agent may be characterized by a particular feature and/or effect. For example, as used herein, the term “therapeutic agent” refers to a physical entity has a therapeutic effect and/or elicits a desired biological and/or pharmacological effect. In some embodiments, an agent may be a compound, molecule, or entity of any chemical class including, for example, a small molecule, polypeptide, nucleic acid, saccharide, lipid, metal, or a combination or complex thereof.

[0316] Aliphatic: The term “aliphatic” refers to a straight-chain (i.e., unbranched) or branched, substituted or unsubstituted hydrocarbon chain that is completely saturated or that contains one or more units of unsaturation, or a monocyclic hydrocarbon or bicyclic hydrocarbon that is completely saturated or that contains one or more units of unsaturation, but which is not aromatic (also referred to herein as “cycloaliphatic”), that has a single point or more than one points of attachment to the rest of the molecule. Unless otherwise specified, aliphatic groups contain 1-12 aliphatic carbon atoms. In some embodiments, aliphatic groups contain 1-6 aliphatic carbon atoms (e.g., C₁₋₆). In some embodiments, aliphatic groups contain 1-5 aliphatic carbon atoms (e.g., C₁₋₅). In other embodiments, aliphatic groups contain 1-4 aliphatic carbon atoms (e.g., C₁₋₄). In still other embodiments, aliphatic groups contain 1-3 aliphatic carbon atoms (e.g., C₁₋₃), and in yet other embodiments, aliphatic groups contain 1-2 aliphatic carbon atoms (e.g., C₁₋₂). Suitable aliphatic groups include, but are not limited to, linear or branched, substituted or unsubstituted alkyl, alkenyl, or alkynyl groups and hybrids thereof. A preferred aliphatic group is C₁₋₆ alkyl.

[0317] Alkyl: The term “alkyl,” used alone or as part of a larger moiety, refers to a saturated, optionally substituted straight or branched chain hydrocarbon group having (unless otherwise specified) 1-12, 1-10, 1-8, 1-6, 1-4, 1-3, or 1-2 carbon atoms (e.g., C₁₋₁₂, C₁₋₁₀, C₁₋₈, C₁₋₆, C₁₋₄, C₁₋₃, or C₁₋₂). Exemplary alkyl groups include methyl, ethyl, propyl, butyl, pentyl, hexyl, and heptyl.

[0318] Alkylene. The term “alkylene” is refers to a bivalent alkyl group. In some embodiments, “alkylene” is a bivalent straight or branched alkyl group. In some embodiments, an “alkylene chain” is a polymethylene group, i.e., —(CH₂)ₙ—, wherein n is a positive integer, e.g., from 1 to 6, from 1 to 4, from 1 to 3, from 1 to 2, or from 2 to 3. An optionally substituted alkylene chain is a polymethylene group in which one or more methylene hydrogen atoms is optionally replaced with a substituent. Suitable substituents include those described below for a substituted aliphatic group and also include those described in the specification herein. It will be appreciated that two substituents of the alkylene group may be taken together to form a ring system. In certain embodiments, two substituents can be taken together to form a 3- to 7-membered ring. The substituents can be on the same or different atoms. The suffix “-ene” or “-enyl” when appended to certain groups herein are intended to refer to a bifunctional moiety of said group. For example, “-ene” or “-enyl”, when appended to “cyclopropyl” becomes “cyclopropylene” or “cyclopropylenyl” and is intended to refer to a bifunctional cyclopropyl group, e.g.,

[chemical structure]

[0319] Alkenyl: The term “alkenyl”, used alone or as part of a larger moiety, refers to an optionally substituted straight or branched chain or cyclic hydrocarbon group having at least one double bond and having (unless otherwise specified) 2-12, 2-10, 2-8, 2-6, 2-4, or 2-3 carbon atoms (e.g., C₂₋₁₂, C₂₋₁₀, C₂₋₈, C₂₋₆, C₂₋₄, or C₂₋₃). Exemplary alkenyl groups include ethenyl, propenyl, butenyl, pentenyl, hexenyl, and heptenyl. The term “cycloalkenyl” refers to an optionally substituted non-aromatic monocyclic or multicyclic ring system containing at least one carbon-carbon double bond and having about 3 to about 10 carbon atoms. Exemplary monocyclic cycloalkenyl rings include cyclopentenyl, cyclohexenyl, and cycloheptenyl.

[0320] Alkynyl: The term “alkynyl”, used alone or as part of a larger moiety, refers to an optionally substituted straight or branched chain hydrocarbon group having at least one triple bond and having (unless otherwise specified) 2-12, 2-10, 2-8, 2-6, 2-4, or 2-3 carbon atoms (e.g., C₂₋₁₂, C₂₋₁₀, C₂₋₈, C₂₋₆, C₂₋₄, or C₂₋₃). Exemplary alkynyl groups include ethynyl, propynyl, butynyl, pentynyl, hexynyl, and heptynyl.

[0321] Amino acid: In its broadest sense, as used herein, the term “amino acid” refers to a compound and/or substance that can be, is, or has been incorporated into a polypeptide chain, e.g., through formation of one or more peptide bonds. In some embodiments, an amino acid has the general structure H₂N—C(H)(R)—COOH. In some embodiments, an amino acid is a naturally-occurring amino acid. In some embodiments, an amino acid is a non-natural amino acid; in some embodiments, an amino acid is a D-amino acid; in some embodiments, an amino acid is an L-amino acid. “Standard amino acid” refers to any of the twenty standard L-amino acids commonly found in naturally occurring peptides. “Nonstandard amino acid” refers to any amino acid, other than the standard amino acids, regardless of whether it is prepared synthetically or obtained from a natural source. In some embodiments, an amino acid, including a carboxy- and/or amino-terminal amino acid in a polypeptide, can contain a structural modification as compared with the general structure above. For example, in some embodiments, an amino acid may be modified by methylation, amidation, acetylation, pegylation, glycosylation, phosphorylation, and/or substitution (e.g., of the amino group, the carboxylic acid group, one or more protons, and/or the hydroxyl group) as compared with the general structure. In some embodiments, such modification may, for example, alter the circulating half-life of a polypeptide containing the modified amino acid as compared with one containing an otherwise identical unmodified amino acid. In some embodiments, such modification does not significantly alter a relevant activity of a polypeptide containing the modified amino acid, as compared with one containing an otherwise identical unmodified amino acid. As will be clear from context, in some embodiments, the term “amino acid” may be used to refer to a free amino acid; in some embodiments it may be used to refer to an amino acid residue of a polypeptide.

[0322] Antibody agent: As used herein, the term “antibody agent” refers to any polypeptide or polypeptide complex that includes immunoglobulin structural elements sufficient to confer specific binding to a particular antigen. Exemplary antibody agents include, but are not limited to monoclonal antibodies or polyclonal antibodies. In some embodiments, an antibody agent may include one or more constant region sequences that are characteristic of mouse, rabbit, primate, or human antibodies. In some embodiments, an antibody agent may include one or more sequence elements are humanized, primatized, chimeric, etc., as is known in the art. In some embodiments, the term “antibody agent” is used to refer to one or more of the art-known or developed constructs or formats for utilizing antibody structural and functional features in alternative presentation. For example, in some embodiments, an antibody agent utilized in accordance with the present disclosure is in a format selected from, but not limited to, intact IgA, IgG, IgE or IgM antibodies; bi- or multi-specific antibodies (e.g., Zybodies®, etc.); CrossMabs (e.g., CrossMab^{CH1-CL}; CrossMab^{CH1-CLcv}; bispecific CrossMab^{CH1-CL} with knob-in-hole); antibody fragments such as Fab fragments, Fab′ fragments, F(ab′)2 fragments, Fd′ fragments, Fd fragments, and isolated complementarity determining regions (CDRs) or sets thereof; single chain Fvs (scFvs); scFv-Fc fusions; polypeptide-Fc fusions; single domain antibodies (e.g., shark single domain antibodies such as IgNAR or fragments thereof); cameloid antibodies; masked antibodies (e.g., Probodies®); Small Modular ImmunoPharmaceuticals (“SMIPs™”); single chain or Tandem diabodies (TandAb®); VHHs; Anticalins®; Nanobodies® minibodies; BiTE®s; ankyrin repeat proteins or DARPINs®; Avimers®; DARTs; TCR-like antibodies; Adnectins®; Affilins®; Trans-bodies®; Affibodies®; TrimerX®; MicroProteins; Fynomers®, Centyrins®; and KALBITOR®s. In some embodiments, chains and/or fragments of such antibodies and fragments may be used in combination, e.g., a scFv-Fc arm with a conventional antibody arm. In some embodiments, an antibody agent is a broadly neutralizing antibody agent (e.g., a broadly neutralizing antibody (bNab)). A “broadly neutralizing antibody agent” is an antibody agent that is capable of neutralizing two or more genetic variants (e.g., strains) of a virus (e.g., HIV). In some embodiments, an antibody may lack a covalent modification (e.g., attachment of a glycan) that it would have if produced naturally. In some embodiments, an antibody may contain a covalent modification (e.g., attachment of a glycan, a payload (e.g., a detectable moiety, a therapeutic moiety, a catalytic moiety, etc.), or other pendant group (e.g., poly-ethylene glycol, etc.)). In many embodiments, an antibody agent is or comprises a polypeptide whose amino acid sequence includes one or more structural elements recognized by those skilled in the art as a complementarity determining region (CDR); in some embodiments an antibody agent is or comprises a polypeptide whose amino acid sequence includes at least one CDR (e.g., at least one heavy chain CDR and/or at least one light chain CDR) that is substantially identical to one found in a reference antibody. In some embodiments an included CDR is substantially identical to a reference CDR in that it is either identical in sequence or contains between 1-5 amino acid substitutions as compared with the reference CDR. In some embodiments an included CDR is substantially identical to a reference CDR in that it shows at least 85%, 86%, 87%, 88%, 89%, 90%, 91%, 92%, 93%, 94%, 95%, 96%, 97%, 98%, 99%, or 100% sequence identity with the reference CDR. In some embodiments, an included CDR is substantially identical to a reference CDR in that it shows at least 95%, 96%, 97%, 98%, 99%, or 100% sequence identity with the reference CDR. In some embodiments an included CDR is substantially identical to a reference CDR in that at least one amino acid within the included CDR is deleted, added, or substituted as compared with the reference CDR but the included CDR has an amino acid sequence that is otherwise identical with that of the reference CDR. In some embodiments an included CDR is substantially identical to a reference CDR in that 1-5 amino acids within the included CDR are deleted, added, or substituted as compared with the reference CDR but the included CDR has an amino acid sequence that is otherwise identical to the reference CDR. In some embodiments, an included CDR is substantially identical to a reference CDR in that at least one amino acid within the included CDR is substituted as compared with the reference CDR but the included CDR has an amino acid sequence that is otherwise identical with that of the reference CDR. In some embodiments, an included CDR is substantially identical to a reference CDR in that 1-5 amino acids within the included CDR are deleted, added, or substituted as compared with the reference CDR but the included CDR has an amino acid sequence that is otherwise identical to the reference CDR. In some embodiments, an antibody agent is or comprises a polypeptide whose amino acid sequence includes structural elements recognized by those skilled in the art as an immunoglobulin variable domain. In some embodiments, an antibody agent is a polypeptide protein having a binding domain which is homologous or largely homologous to an immunoglobulin-binding domain.

[0323] Aryl: The term “aryl” refers to monocyclic and bicyclic ring systems having a total of six to fourteen ring members (e.g., C6-C14), wherein at least one ring in the system is aromatic and wherein each ring in the system contains three to seven ring members. In some embodiments, an “aryl” group contains between six and twelve total ring members (e.g., C6-C12). The term “aryl” may be used interchangeably with the term “aryl ring”. In certain embodiments, “aryl” refers to an aromatic ring system which includes, but not limited to, phenyl, biphenyl, naphthyl, anthracyl and the like, which may bear one or more substituents. Unless otherwise specified, “aryl” groups are hydrocarbons. In some embodiments, an “aryl” ring system is an aromatic ring (e.g., phenyl) that is fused to a non-aromatic ring (e.g., cycloalkyl). Examples of aryl rings include that are fused include

[chemical structure]

[0324] Associated: Two events or entities are “associated” with one another, as that term is used herein, if the presence, level, degree, type and/or form of one is correlated with that of the other. For example, a particular entity (e.g., polypeptide, genetic signature, metabolite, microbe, etc.) is considered to be associated with a particular disease, disorder, or condition, if its presence, level and/or form correlates with incidence of, susceptibility to, severity of, stage of, etc. the disease, disorder, or condition (e.g., across a relevant population). In some embodiments, two or more entities are physically “associated” with one another if they interact, directly or indirectly, so that they are and/or remain in physical proximity with one another. In some embodiments, two or more entities that are physically associated with one another are covalently linked to one another; in some embodiments, two or more entities that are physically associated with one another are not covalently linked to one another but are non-covalently associated, for example by means of hydrogen bonds, van der Waals interaction, hydrophobic interactions, magnetism, and combinations thereof.

[0325] Co-administration: As used herein, the term “co-administration” refers to use of a composition (e.g., a pharmaceutical composition) described herein and one or more additional therapeutic agents. In some embodiments, one or more additional therapeutic agents comprises at least one polyribonucleotide encoding another antibody agent (e.g., an anti-HIV antigen antibody agent). The combined use of a composition (e.g., a pharmaceutical composition) described herein and an additional therapeutic agent may be performed concurrently or separately (e.g., sequentially in any order). In some embodiments, a composition (e.g., a pharmaceutical composition) described herein and an additional therapeutic agent may be combined in one pharmaceutically-acceptable excipient, or they may be placed in separate excipient and delivered to a target cell or administered to a subject at different times. Each of these situations is contemplated as falling within the meaning of “co-administration” or “combination,” provided that a composition (e.g., a pharmaceutical composition) described herein and an additional therapeutic agent are delivered or administered sufficiently close in time that there is at least some temporal overlap in biological effect(s) generated by each on a target cell or a subject being treated.

[0326] Combination therapy: As used herein, the term “combination therapy” refers to those situations in which a subject is simultaneously exposed to two or more therapeutic regimens (e.g., two or more therapeutic agents (e.g., two or more antibody agents)). In some embodiments, the two or more regimens may be administered simultaneously; in some embodiments, such regimens may be administered sequentially (e.g., all “doses” of a first regimen are administered prior to administration of any doses of a second regimen); in some embodiments, such agents are administered in overlapping dosing regimens. In some embodiments, administration of combination therapy may involve administration of one or more agent(s) or modality(ies) to a subject receiving the other agent(s) or modality(ies) in the combination. For clarity, combination therapy does not require that individual agents be administered together in a single composition (or even necessarily at the same time), although in some embodiments, two or more agents, or active moieties thereof, may be administered together in a combination composition. In some embodiments, a combination therapy comprises polyribonucleotides encoding two or more antibody agents (e.g., anti-HIV antibody agents).

[0327] Comparable. As used herein, the term “comparable” refers to two or more agents, entities, situations, sets of conditions, etc., that may not be identical to one another but that are sufficiently similar to permit comparison there between so that one skilled in the art will appreciate that conclusions may reasonably be drawn based on differences or similarities observed. In some embodiments, comparable sets of conditions, circumstances, individuals, or populations are characterized by a plurality of substantially identical features and one or a small number of varied features. Those of ordinary skill in the art will understand, in context, what degree of identity is required in any given circumstance for two or more such agents, entities, situations, sets of conditions, etc. to be considered comparable. For example, those of ordinary skill in the art will appreciate that sets of circumstances, individuals, or populations are comparable to one another when characterized by a sufficient number and type of substantially identical features to warrant a reasonable conclusion that differences in results obtained or phenomena observed under or with different sets of circumstances, individuals, or populations are caused by or indicative of the variation in those features that are varied.

[0328] Corresponding to: As used herein, the term “corresponding to” refers to a relationship between two or more entities. For example, the term “corresponding to” may be used to designate the position/identity of a structural element in a compound or composition relative to another compound or composition (e.g., to an appropriate reference compound or composition). For example, in some embodiments, a monomeric residue in a polymer (e.g., an amino acid residue in a polypeptide or a nucleic acid residue in a polynucleotide) may be identified as “corresponding to” a residue in an appropriate reference polymer. For example, those of ordinary skill will appreciate that, for purposes of simplicity, residues in a polypeptide are often designated using a canonical numbering system based on a reference related polypeptide, so that an amino acid “corresponding to” a residue at position 190, for example, need not actually be the 190^{th} amino acid in a particular amino acid chain but rather corresponds to the residue found at 190 in the reference polypeptide; those of ordinary skill in the art readily appreciate how to identify “corresponding” amino acids. For example, those skilled in the art will be aware of various sequence alignment strategies, including software programs such as, for example, BLAST, CS-BLAST, CUSASW++, DIAMOND, FASTA, GGSEARCH/GLSEARCH, Genoogle, HMMER, HHpred/HHsearch, IDF, Infernal, KLAST, USEARCH, parasail, PSI-BLAST, PSI-Search, ScalaBLAST, Sequilab, SAM, SSEARCH, SWAPHI, SWAPHI-LS, SWIMM, or SWIPE that can be utilized, for example, to identify “corresponding” residues in polypeptides and/or nucleic acids in accordance with the present disclosure. Those of skill in the art will also appreciate that, in some instances, the term “corresponding to” may be used to describe an event or entity that shares a relevant similarity with another event or entity (e.g., an appropriate reference event or entity). To give but one example, a gene or protein in one organism may be described as “corresponding to” a gene or protein from another organism in order to indicate, in some embodiments, that it plays an analogous role or performs an analogous function and/or that it shows a particular degree of sequence identity or homology, or shares a particular characteristic sequence element.

[0329] Cycloaliphatic: As used herein, the term “cycloaliphatic” refers to a monocyclic C₃₋₈ hydrocarbon or a bicyclic C₆₋₁₀ hydrocarbon that is completely saturated or that contains one or more units of unsaturation, but which is not aromatic, that has a single point or more than one points of attachment to the rest of the molecule.

[0330] Cycloalkyl: As used herein, the term “cycloalkyl” refers to an optionally substituted saturated ring monocyclic or polycyclic system of about 3 to about 10 ring carbon atoms. Exemplary monocyclic cycloalkyl rings include cyclopropyl, cyclobutyl, cyclopentyl, cyclohexyl, and cycloheptyl.

[0331] Derived. In the context of an amino acid sequence (peptide or polypeptide) “derived from” a designated amino acid sequence (peptide or polypeptide), it refers to a structural analogue of a designated amino acid sequence. In some embodiments, an amino acid sequence which is derived from a particular amino acid sequence has an amino acid sequence that is identical, essentially identical or homologous to that particular sequence or a fragment thereof. Amino acid sequences derived from a particular amino acid sequence may be variants of that particular sequence or a fragment thereof. For example, antibody agents utilized according to the present disclosure may include amino acid sequences (e.g., CDRs, variable domains, constant domains, etc.) derived from other antibodies, e.g., naturally produced antibodies.

[0332] Detecting: The term “detecting” is used broadly herein to include appropriate means of determining the presence or absence of an entity of interest or any form of measurement of an entity of interest in a sample. Thus, “detecting” may include determining, measuring, assessing, or assaying the presence or absence, level, amount, and/or location of an entity of interest. Quantitative and qualitative determinations, measurements or assessments are included, including semi-quantitative. Such determinations, measurements or assessments may be relative, for example when an entity of interest is being detected relative to a control reference, or absolute. As such, the term “quantifying” when used in the context of quantifying an entity of interest can refer to absolute or to relative quantification. Absolute quantification may be accomplished by correlating a detected level of an entity of interest to known control standards (e.g., through generation of a standard curve). Alternatively, relative quantification can be accomplished by comparison of detected levels or amounts between two or more different entities of interest to provide a relative quantification of each of the two or more different entities of interest, i.e., relative to each other.

[0333] Dosing regimen: Those skilled in the art will appreciate that the term “dosing regimen” (or “therapeutic regimen”) may be used to refer to a set of unit doses (typically more than one) that are administered individually to a subject, typically separated by periods of time. In some embodiments, a given therapeutic agent has a recommended dosing regimen, which may involve one or more doses.

[0334] Encode: As used herein, the term “encode” or “encoding” refers to sequence information of a first molecule that guides production of a second molecule having a defined sequence of nucleotides (e.g., a polyribonucleotide) or a defined sequence of amino acids. For example, a DNA molecule can encode an RNA molecule (e.g., by a transcription process that includes a DNA-dependent RNA polymerase enzyme). An RNA molecule can encode a polypeptide (e.g., by a translation process). Thus, a gene, a cDNA, or an RNA molecule encodes a polypeptide if transcription and translation of RNA corresponding to that gene produces the polypeptide in a cell or other biological system. In some embodiments, a coding region of a polyribonucleotide encoding a target antigen refers to a coding strand, the nucleotide sequence of which is identical to the polyribonucleotide sequence of such a target antigen. In some embodiments, a coding region of a polyribonucleotide encoding a target antigen refers to a non-coding strand of such a target antigen, which may be used as a template for transcription of a gene or cDNA.

[0335] Engineered: In general, the term “engineered” refers to the aspect of having been manipulated by the hand of man. For example, a polynucleotide is considered to be “engineered” when two or more sequences that are not linked together in that order in nature are manipulated by the hand of man to be directly linked to one another in the engineered polynucleotide and/or when a particular residue in a polynucleotide is non-naturally occurring and/or is caused through action of the hand of man to be linked with an entity or moiety with which it is not linked in nature.

[0336] Epitope: As used herein, the term “epitope” refers to a moiety that is specifically recognized by an immunoglobulin (e.g., antibody or receptor) binding component. For example, an epitope may be recognized by a T cell, a B cell, or an antibody. In some embodiments, an epitope is comprised of a plurality of chemical atoms or groups on an antigen. In some embodiments, such chemical atoms or groups are surface-exposed when the antigen adopts a relevant three-dimensional conformation. In some embodiments, such chemical atoms or groups are physically near to each other in space when the antigen adopts such a conformation. In some embodiments, at least some such chemical atoms are groups are physically separated from one another when the antigen adopts an alternative conformation (e.g., is linearized). Accordingly, in some embodiments, an epitope of an antigen may include a continuous or discontinuous portion of the antigen. In some embodiments, an epitope is or comprises a T cell epitope. In some embodiments, an epitope may have a length of about 5 to about 30 amino acids, or about 10 to about 25 amino acids, or about 5 to about 15 amino acids, or about 5 to 12 amino acids, or about 6 to about 9 amino acids.

[0337] Expression: As used herein, the term “expression” of a nucleic acid sequence refers to the generation of a gene product from the nucleic acid sequence. In some embodiments, a gene product can be a transcript, e.g., a polyribonucleotide as provided herein. In some embodiments, a gene product can be a polypeptide. In some embodiments, expression of a nucleic acid sequence involves one or more of the following: (1) production of an RNA template from a DNA sequence (e.g., by transcription); (2) processing of an RNA transcript (e.g., by splicing, editing, etc.); (3) translation of an RNA into a polypeptide or protein; and/or (4) post-translational modification of a polypeptide or protein.

[0338] Heteroaliphatic: The term “heteroaliphatic” or “heteroaliphatic group,” as used herein, denotes an optionally substituted hydrocarbon moiety having, in addition to carbon atoms, from one to five heteroatoms, that may be straight-chain (i.e., unbranched), branched, or cyclic (“heterocyclic”) and may be completely saturated or may contain one or more units of unsaturation, but which is not aromatic. The term “heteroatom” refers to nitrogen, oxygen, or sulfur, and includes any oxidized form of nitrogen or sulfur, and any quaternized form of a basic nitrogen. The term “nitrogen” also includes a substituted nitrogen. Unless otherwise specified, heteroaliphatic groups contain 1-10 carbon atoms wherein 1-3 carbon atoms are optionally and independently replaced with heteroatoms selected from oxygen, nitrogen, and sulfur. In some embodiments, heteroaliphatic groups contain 1-4 carbon atoms, wherein 1-2 carbon atoms are optionally and independently replaced with heteroatoms selected from oxygen, nitrogen, and sulfur. In yet other embodiments, heteroaliphatic groups contain 1-3 carbon atoms, wherein 1 carbon atom is optionally and independently replaced with a heteroatom selected from oxygen, nitrogen, and sulfur. Suitable heteroaliphatic groups include, but are not limited to, linear or branched, heteroalkyl, heteroalkenyl, and heteroalkynyl groups. For example, a 1- to 10 atom heteroaliphatic group includes the following exemplary groups: —O—CH₃, —CH₂—O—CH₃, —O—CH₂—CH₂—O—CH₂—CH₂—O—CH₃, and the like.

[0339] Heteroaryl: The terms “heteroaryl” and “heteroar-”, used alone or as part of a larger moiety, e.g., “heteroaralkyl”, or “heteroaralkoxy”, refer to monocyclic or bicyclic ring groups having 5 to 10 ring atoms (e.g., 5- to 6-membered monocyclic heteroaryl or 9- to 10-membered bicyclic heteroaryl); having 6, 10, or 14 n-electrons shared in a cyclic array; and having, in addition to carbon atoms, from one to five heteroatoms. Heteroaryl groups include, without limitation, thienyl, furanyl, pyrrolyl, imidazolyl, pyrazolyl, triazolyl, tetrazolyl, oxazolyl, isoxazolyl, oxadiazolyl, thiazolyl, isothiazolyl, thiadiazolyl, pyridyl, pyridazinyl, pyrimidinyl, pyrazinyl, indolizinyl, purinyl, naphthyridinyl, pteridinyl, imidazo[1,2-a]pyrimidinyl, imidazo[1,2-a]pyridyl, imidazo[4,5-b]pyridyl, imidazo[4,5-c]pyridyl, pyrrolopyridyl, pyrrolopyrazinyl, thienopyrimidinyl, triazolopyridyl, and benzoisoxazolyl. The terms “heteroaryl” and “heteroar-”, as used herein, also include groups in which a heteroaromatic ring is fused to one or more aryl, cycloaliphatic, or heterocyclyl rings, where the radical or point of attachment is on the heteroaromatic ring (i.e., a bicyclic heteroaryl ring having 1 to 3 heteroatoms). Nonlimiting examples include indolyl, isoindolyl, benzothienyl, benzofuranyl, dibenzofuranyl, indazolyl, benzimidazolyl, benzotriazolyl, benzothiazolyl, benzothiadiazolyl, benzoxazolyl, quinolyl, isoquinolyl, cinnolinyl, phthalazinyl, quinazolinyl, quinoxalinyl, 4H-quinolizinyl, carbazolyl, acridinyl, phenazinyl, phenothiazinyl, phenoxazinyl, tetrahydroquinolinyl, tetrahydroisoquinolinyl, pyrido[2,3-b]-1,4-oxazin-3(4H)-one, 4H-thieno[3,2-b]pyrrole, and benzoisoxazolyl. The term “heteroaryl” may be used interchangeably with the terms “heteroaryl ring”, “heteroaryl group”, or “heteroaromatic”, any of which terms include rings that are optionally substituted.

[0340] Heteroatonm: The term “heteroatom” as used herein refers to nitrogen, oxygen, or sulfur, and includes any oxidized form of nitrogen or sulfur, and any quaternized form of a basic nitrogen.

[0341] Heterocycle: As used herein, the terms “heterocycle”, “heterocyclyl”, “heterocyclic radical”, and “heterocyclic ring” are used interchangeably and refer to a stable 3- to 8-membered monocyclic, a 6- to 10-membered bicyclic, or a 10- to 16-membered polycyclic heterocyclic moiety that is either saturated or partially unsaturated, and having, in addition to carbon atoms, one or more, such as one to four, heteroatoms, as defined above. When used in reference to a ring atom of a heterocycle, the term “nitrogen” includes a substituted nitrogen. As an example, in a saturated or partially unsaturated ring having 0-3 heteroatoms selected from oxygen, sulfur or nitrogen, the nitrogen may be N (as in 3,4-dihydro-2H-pyrrolyl), NH (as in pyrrolidinyl), or NR⁺ (as in N-substituted pyrrolidinyl). A heterocyclic ring can be attached to its pendant group at any heteroatom or carbon atom that results in a stable structure and any of the ring atoms can be optionally substituted. Examples of such saturated or partially unsaturated heterocyclic radicals include, without limitation, azetidinyl, oxetanyl, tetrahydrofuranyl, tetrahydrothienyl, pyrrolidinyl, piperidinyl, decahydroquinolinyl, oxazolidinyl, piperazinyl, dioxanyl, dioxolanyl, diazepinyl, oxazepinyl, thiazepinyl, morpholinyl, and thiamorpholinyl. A heterocyclyl group may be mono-, bi-, tri-, or polycyclic, preferably mono-, bi-, or tricyclic, more preferably mono- or bicyclic. A bicyclic heterocyclic ring also includes groups in which the heterocyclic ring is fused to one or more aryl rings. Exemplary bicyclic heterocyclic groups include indolinyl, isoindolinyl, benzodioxolyl, 1,3-dihydroisobenzofuranyl, 2,3-dihydrobenzofuranyl, and tetrahydroquinolinyl. A bicyclic heterocyclic ring can also be a spirocyclic ring system (e.g., 7- to 11-membered spirocyclic fused heterocyclic ring having, in addition to carbon atoms, one or more heteroatoms as defined above (e.g., one, two, three or four heteroatoms)). A bicyclic heterocyclic ring can also be a bridged ring system (e.g., 7- to 11-membered bridged heterocyclic ring having one, two, or three bridging atoms.

[0342] Homology: As used herein, the term “homology” or “homolog” refers to the overall relatedness between polynucleotide molecules (e.g., DNA molecules and/or RNA molecules) and/or between polypeptide molecules. In some embodiments, polynucleotide molecules (e.g., DNA molecules and/or RNA molecules) and/or polypeptide molecules are considered to be “homologous” to one another if their sequences are at least 15%, 20%, 25%, 30%, 35%, 40%, 45%, 50%, 55%, 60%, 65%, 70%, 75%, 80%, 85%, 90%, 95%, or 99% identical. In some embodiments, polynucleotide molecules (e.g., DNA molecules and/or RNA molecules) and/or polypeptide molecules are considered to be “homologous” to one another if their sequences are at least 25%, 30%, 35%, 40%, 45%, 50%, 55%, 60%, 65%, 70%, 75%, 80%, 85%, 90%, 95%, or 99% similar (e.g., containing residues with related chemical properties at corresponding positions). For example, as is well known by those of ordinary skill in the art, certain amino acids are typically classified as similar to one another as “hydrophobic” or “hydrophilic” amino acids, and/or as having “polar” or “non-polar” side chains. Substitution of one amino acid for another of the same type may often be considered a “homologous” substitution.

[0343] Identity: As used herein, the term “identity” refers to the overall relatedness between polynucleotide molecules (e.g., DNA molecules and/or RNA molecules) and/or between polypeptide molecules. In some embodiments, polynucleotide molecules (e.g., DNA molecules and/or RNA molecules) and/or between polypeptide molecules are considered to be “substantially identical” to one another if their sequences are at least 80%, 85%, 90%, 95%, 96%, 97%, 98%, or 99% identical. Calculation of the percent identity of two nucleic acid or polypeptide sequences, for example, can be performed by aligning the two sequences for optimal comparison purposes (e.g., gaps can be introduced in one or both of a first and a second sequence for optimal alignment and non-identical sequences can be disregarded for comparison purposes). In certain embodiments, the length of a sequence aligned for comparison purposes is at least 30%, at least 40%, at least 50%, at least 60%, at least 70%, at least 75%, at least 80%, at least 85%, at least 90%, at least 95%, at least 96%, at least 97%, at least 98%, at least 99%, or substantially 100% of the length of a reference sequence. The nucleotides at corresponding positions are then compared. When a position in the first sequence is occupied by the same residue (e.g., nucleotide or amino acid) as the corresponding position in the second sequence, then the molecules are identical at that position. The percent identity between the two sequences is a function of the number of identical positions shared by the sequences, taking into account the number of gaps, and the length of each gap, which needs to be introduced for optimal alignment of the two sequences. The comparison of sequences and determination of percent identity between two sequences can be accomplished using a mathematical algorithm. For example, the percent identity between two nucleotide sequences can be determined using the algorithm of Meyers and Miller, 1989, which has been incorporated into the ALIGN program (version 2.0). In some exemplary embodiments, nucleic acid sequence comparisons made with the ALIGN program use a PAM120 weight residue table, a gap length penalty of 12 and a gap penalty of 4. The percent identity between two nucleotide sequences can, alternatively, be determined using the GAP program in the GCG software package using an NWSgapdna.CMP matrix.

[0344] Increased, Induced, or Reduced: As used herein, these terms or grammatically comparable comparative terms, indicate values that are relative to a comparable reference measurement. For example, in some embodiments, an assessed value achieved with a provided composition (e.g., a pharmaceutical composition) may be “increased” relative to that obtained with a comparable reference composition. Alternatively or additionally, in some embodiments, an assessed value achieved in a subject may be “increased” relative to that obtained in the same subject under different conditions (e.g., prior to or after an event; or presence or absence of an event such as administration of a composition (e.g., a pharmaceutical composition) as described herein, or in a different, comparable subject (e.g., in a comparable subject that differs from the subject of interest in prior exposure to a condition, e.g., absence of administration of a composition (e.g., a pharmaceutical composition) as described herein.). In some embodiments, comparative terms refer to statistically relevant differences (e.g., that are of a prevalence and/or magnitude sufficient to achieve statistical relevance). Those skilled in the art will be aware, or will readily be able to determine, in a given context, a degree and/or prevalence of difference that is required or sufficient to achieve such statistical significance. In some embodiments, the term “reduced” or equivalent terms refers to a reduction in the level of an assessed value by at least 5%, at least 10%, at least 20%, at least 50%, at least 75% or higher, as compared to a comparable reference. In some embodiments, the term “reduced” or equivalent terms refers to a complete or essentially complete inhibition, i.e., a reduction to zero or essentially to zero. In some embodiments, the term “increased” or “induced” refers to an increase in the level of an assessed value by at least 10%, at least 20%, at least 30%, at least 40%, at least 50%, at least 80%, at least 100%, at least 200%, at least 500%, or higher, as compared to a comparable reference.

[0345] In order: As used herein with reference to a polynucleotide or polyribonucleotide, “in order” refers to the order of features from 5′ to 3′ along the polynucleotide or polyribonucleotide. As used herein with reference to a polypeptide, “in order” refers to the order of features moving from the N-terminal-most of the features to the C-terminal-most of the features along the polypeptide. “In order” does not mean that no additional features can be present among the listed features. For example, if Features A, B, and C of a polynucleotide are described herein as being “in order, Feature A, Feature B, and Feature C,” this description does not exclude, e.g., Feature D being located between Features A and B.

[0346] Ionizable: The term “ionizable” refers to a compound or group or atom that is charged at a certain pH. In the context of an ionizable amino lipid, such a lipid or a function group or atom thereof bears a positive charge at a certain pH. In some embodiments, an ionizable amino lipid is positively charged at an acidic pH. In some embodiments, an ionizable amino lipid is predominately neutral at physiological pH values, e.g., in some embodiments about 7.0-7.4, but becomes positively charged at lower pH values. In some embodiments, an ionizable amino lipid may have a pKa within a range of about 5 to about 7.

[0347] Isolated. The term “isolated” means altered or removed from the natural state. For example, a nucleic acid or a peptide naturally present in a living animal is not “isolated,” but the same nucleic acid or peptide partially or completely separated from the coexisting materials of its natural state is “isolated.” An isolated nucleic acid or protein can exist in substantially purified form, or can exist in a non-native environment such as, for example, a host cell.

[0348] Lipid: As used herein, the terms “lipid” and “lipid-like material” are broadly defined as molecules which comprise one or more hydrophobic moieties or groups and optionally also one or more hydrophilic moieties or groups. Molecules comprising hydrophobic moieties and hydrophilic moieties are also typically denoted as amphiphiles.

[0349] RNA lipid nanoparticle: As used herein, the term “RNA lipid nanoparticle” refers to a nanoparticle comprising at least one lipid and RNA molecule(s), e.g., one or more polyribonucleotides as provided herein. In some embodiments, an RNA lipid nanoparticle comprises at least one cationic amino lipid. In some embodiments, an RNA lipid nanoparticle comprises at least one cationic amino lipid, at least one helper lipid, and at least one polymer-conjugated lipid (e.g., PEG-conjugated lipid). In various embodiments, RNA lipid nanoparticles as described herein can have an average size (e.g., Z-average) of about 100 nm to 1000 nm, or about 200 nm to 900 nm, or about 200 nm to 800 nm, or about 250 nm to about 700 nm. In some embodiments of the present disclosure, RNA lipid nanoparticles can have a particle size (e.g., Z-average) of about 30 nm to about 200 nm, or about 30 nm to about 150 nm, about 40 nm to about 150 nm, about 50 nm to about 150 nm, about 60 nm to about 130 nm, about 70 nm to about 110 nm, about 70 nm to about 100 nm, about 80 nm to about 100 nm, about 90 nm to about 100 nm, about 70 to about 90 nm, about 80 nm to about 90 nm, or about 70 nm to about 80 nm. In some embodiments, an average size of lipid nanoparticles is determined by measuring the average particle diameter. In some embodiments, RNA lipid nanoparticles may be prepared by mixing lipids with RNA molecules described herein.

[0350] Neutralization: As used herein, the term “neutralization” refers to an event in which binding agents such as antibodies bind to a biological active site of a virus such as a receptor binding protein, thereby inhibiting the parasitic infection of cells. In some embodiments, the term “neutralization” refers to an event in which binding agents eliminate or significantly reduce ability of infecting cells.

[0351] Nucleic acid/Polynucleotide: As used herein, the term “nucleic acid” refers to a polymer of at least 10 nucleotides or more. In some embodiments, a nucleic acid is or comprises DNA. In some embodiments, a nucleic acid is or comprises RNA. In some embodiments, a nucleic acid is or comprises peptide nucleic acid (PNA). In some embodiments, a nucleic acid is or comprises a single stranded nucleic acid. In some embodiments, a nucleic acid is or comprises a double-stranded nucleic acid. In some embodiments, a nucleic acid comprises both single and double-stranded portions. In some embodiments, a nucleic acid comprises a backbone that comprises one or more phosphodiester linkages. In some embodiments, a nucleic acid comprises a backbone that comprises both phosphodiester and non-phosphodiester linkages. For example, in some embodiments, a nucleic acid may comprise a backbone that comprises one or more phosphorothioate or 5′-N-phosphoramidite linkages and/or one or more peptide bonds, e.g., as in a “peptide nucleic acid”. In some embodiments, a nucleic acid comprises one or more, or all, natural residues (e.g., adenine, cytosine, deoxyadenosine, deoxycytidine, deoxyguanosine, deoxythymidine, guanine, thymine, uracil). In some embodiments, a nucleic acid comprises on or more, or all, non-natural residues. In some embodiments, a non-natural residue comprises a nucleoside analog (e.g., 2-aminoadenosine, 2-thiothymidine, inosine, pyrrolo-pyrimidine, 3-methyl adenosine, 5-methylcytidine, C-5 propynyl-cytidine, C-5 propynyl-uridine, 2-aminoadenosine, C5-bromouridine, C5-fluorouridine, C5-iodouridine, C5-propynyl-uridine, C5-propynyl-cytidine, C5-methylcytidine, 2-aminoadenosine, 7-deazaadenosine, 7-deazaguanosine, 8-oxoadenosine, 8-oxoguanosine, 6-O-methylguanine, 2-thiocytidine, methylated bases, intercalated bases, and combinations thereof). In some embodiments, a non-natural residue comprises one or more modified sugars (e.g., 2′-fluororibose, ribose, 2′-deoxyribose, arabinose, and hexose) as compared to those in natural residues. In some embodiments, a nucleic acid has a nucleotide sequence that encodes a functional gene product such as an RNA or polypeptide. In some embodiments, a nucleic acid has a nucleotide sequence that comprises one or more introns. In some embodiments, a nucleic acid may be prepared by isolation from a natural source, enzymatic synthesis (e.g., by polymerization based on a complementary template, e.g., in vivo or in vitro), reproduction in a recombinant cell or system, or chemical synthesis. In some embodiments, a nucleic acid is at least 3, 4, 5, 6, 7, 8, 9, 10, 15, 20, 25, 30, 35, 40, 45, 50, 55, 60, 65, 70, 75, 80, 85, 90, 95, 100, 110, 120, 130, 140, 150, 160, 170, 180, 190, 20, 225, 250, 275, 300, 325, 350, 375, 400, 425, 450, 475, 500, 600, 700, 800, 900, 1000, 1500, 2000, 2500, 3000, 3500, 4000, 4500, 5000, 5500, 6000, 6500, 7000, 7500, 8000, 8500, 9000, 9500, 10,000, 10,500, 11,000, 11,500, 12,000, 12,500, 13,000, 13,500, 14,000, 14,500, 15,000, 15,500, 16,000, 16,500, 17,000, 17,500, 18,000, 18,500, 19,000, 19,500, or 20,000 or more residues or nucleotides long.

[0352] Pharmaceutically effective amount: The term “pharmaceutically effective amount” or “therapeutically effective amount” refers to the amount which achieves a desired reaction or a desired effect alone or together with further doses. In the case of the treatment of a particular disease (e.g., HIV), a desired reaction in some embodiments relates to inhibition of the course of the disease (e.g., HIV). In some embodiments, such inhibition may comprise slowing down the progress of a disease (e.g., HIV) and/or interrupting or reversing the progress of the disease (e.g., HIV). In some embodiments, a desired reaction in a treatment of a disease (e.g., HIV) may be or comprise delay or prevention of the onset of a disease (e.g., HIV) or a condition (e.g., an HIV associated condition). An effective amount of a composition (e.g., a pharmaceutical composition) described herein will depend, for example, on disease (e.g., HIV) or a condition (e.g., an HIV associated condition) to be treated, the severity of such a disease (e.g., HIV) or a condition (e.g., an HIV associated condition), individual parameters of the patient, including, e.g., age, physiological condition, size and weight, the duration of treatment, the type of an accompanying therapy (if present), the specific route of administration and similar factors. Accordingly, doses of a composition (e.g., a pharmaceutical composition) described herein may depend on various of such parameters. In the case that a reaction in a patient is insufficient with an initial dose, higher doses (or effectively higher doses achieved by a different, more localized route of administration) may be used.

[0353] Polypeptide: As used herein, the term “polypeptide” refers to a polymeric chain of amino acids. In some embodiments, a polypeptide has an amino acid sequence that occurs in nature. In some embodiments, a polypeptide has an amino acid sequence that does not occur in nature. In some embodiments, a polypeptide has an amino acid sequence that is engineered in that it is designed and/or produced through action of the hand of man. In some embodiments, a polypeptide may comprise or consist of natural amino acids, non-natural amino acids, or both. In some embodiments, a polypeptide may comprise or consist of only natural amino acids or only non-natural amino acids. In some embodiments, a polypeptide may comprise D-amino acids, L-amino acids, or both. In some embodiments, a polypeptide may comprise only D-amino acids. In some embodiments, a polypeptide may comprise only L-amino acids. In some embodiments, a polypeptide may include one or more pendant groups or other modifications, e.g., modifying or attached to one or more amino acid side chains, at the polypeptide's N-terminus, at the polypeptide's C-terminus, or any combination thereof. In some embodiments, such pendant groups or modifications comprise acetylation, amidation, lipidation, methylation, pegylation, etc., including combinations thereof. In some embodiments, a polypeptide may be cyclic, and/or may comprise a cyclic portion. In some embodiments, a polypeptide is not cyclic and/or does not comprise any cyclic portion. In some embodiments, a polypeptide is linear. In some embodiments, a polypeptide may be or comprise a stapled polypeptide. In some embodiments, the term “polypeptide” may be appended to a name of a reference polypeptide, activity, or structure; in such instances it is used herein to refer to polypeptides that share the relevant activity or structure and thus can be considered to be members of the same class or family of polypeptides. For each such class, the present specification provides and/or those skilled in the art will be aware of exemplary polypeptides within the class whose amino acid sequences and/or functions are known; in some embodiments, such exemplary polypeptides are reference polypeptides for the polypeptide class or family. In some embodiments, a member of a polypeptide class or family shows significant sequence homology or identity with, shares a common sequence motif (e.g., a characteristic sequence element) with, and/or shares a common activity (in some embodiments at a comparable level or within a designated range) with a reference polypeptide of the class; in some embodiments with all polypeptides within the class). For example, in some embodiments, a member polypeptide shows an overall degree of sequence homology or identity with a reference polypeptide that is at least about 30-40%, and is often greater than about 50%, 60%, 70%, 80%, 90%, 91%, 92%, 93%, 94%, 95%, 96%, 97%, 98%, 99% or more and/or includes at least one region (e.g., a conserved region that may in some embodiments be or comprise a characteristic sequence element) that shows very high sequence identity, often greater than 90% or even 95%, 96%, 97%, 98%, or 99%. Such a conserved region usually encompasses at least 3-4 and often up to 35 or more amino acids; in some embodiments, a conserved region encompasses at least one stretch of at least 2, 3, 4, 5, 6, 7, 8, 9, 10, 11, 12, 13, 14, 15, 16, 17, 18, 19, 20, 21, 22, 23, 24, 25, 26, 27, 28, 29, 30, 31, 32, 33, 34, 35 or more contiguous amino acids. In some embodiments, a relevant polypeptide may comprise or consist of a fragment of a parent polypeptide.

[0354] Prevent: As used herein, the term “prevent” or “prevention” when used in connection with the occurrence of a disease, disorder, and/or condition, refers to reducing the risk of developing the disease, disorder and/or condition and/or to delaying onset of one or more characteristics or symptoms of the disease, disorder or condition. Prevention may be considered complete when onset of a disease, disorder or condition has been delayed for a predefined period of time.

[0355] Reference: As used herein, the term “reference” describes a standard or control relative to which a comparison is performed. For example, in some embodiments, an agent, animal, individual, population, sample, sequence or value of interest is compared with a reference or control agent, animal, individual, population, sample, sequence or value. In some embodiments, a reference or control is tested and/or determined substantially simultaneously with the testing or determination of interest. In some embodiments, a reference or control is a historical reference or control, optionally embodied in a tangible medium. Typically, as would be understood by those skilled in the art, a reference or control is determined or characterized under comparable conditions or circumstances to those under assessment. Those skilled in the art will appreciate when sufficient similarities are present to justify reliance on and/or comparison to a particular possible reference or control.

[0356] Ribonucleic acid (RNA) or Polyribonucleotide: As used herein, the term “ribonucleic acid,” “RNA,” or “polyribonucleotide” refers to a polymer of ribonucleotides. In some embodiments, an RNA is single stranded. In some embodiments, an RNA is double stranded. In some embodiments, an RNA comprises both single and double stranded portions. In some embodiments, an RNA can comprise a backbone structure as described in the definition of “Nucleic acid/Polynucleotide” above. An RNA can be a regulatory RNA (e.g., siRNA, microRNA, etc.), or a messenger RNA (mRNA). In some embodiments, an RNA is a mRNA. In some embodiments, where an RNA is a mRNA, a RNA typically comprises at its 3′ end a poly(A) region. In some embodiments, where an RNA is a mRNA, an RNA typically comprises at its 5′ end an art-recognized cap structure, e.g., for recognizing and attachment of a mRNA to a ribosome to initiate translation. In some embodiments, a RNA is a synthetic RNA. Synthetic RNAs include RNAs that are synthesized in vitro (e.g., by enzymatic synthesis methods and/or by chemical synthesis methods).

[0357] Ribonucleotide: As used herein, the term “ribonucleotide” encompasses unmodified ribonucleotides and modified ribonucleotides. For example, unmodified ribonucleotides include the purine bases adenine (A) and guanine (G), and the pyrimidine bases cytosine (C) and uracil (U). Modified ribonucleotides may include one or more modifications including, but not limited to, for example, (a) end modifications, e.g., 5′ end modifications (e.g., phosphorylation, dephosphorylation, conjugation, inverted linkages, etc.), 3′ end modifications (e.g., conjugation, inverted linkages, etc.), (b) base modifications, e.g., replacement with modified bases, stabilizing bases, destabilizing bases, or bases that base pair with an expanded repertoire of partners, or conjugated bases, (c) sugar modifications (e.g., at the 2′ position or 4′ position) or replacement of the sugar, and (d) internucleoside linkage modifications, including modification or replacement of the phosphodiester linkages. The term “ribonucleotide” also encompasses ribonucleotide triphosphates including modified and non-modified ribonucleotide triphosphates.

[0358] Risk: As will be understood from context, “risk” of a disease, disorder, and/or condition refers to a likelihood that a particular individual will develop the disease, disorder, and/or condition. In some embodiments, risk is expressed as a percentage. In some embodiments, risk is expressed as a risk relative to a risk associated with a reference sample or group of reference samples. In some embodiments, a reference sample or group of reference samples have a known risk of a disease, disorder, condition and/or event. In some embodiments, a reference sample or group of reference samples are from individuals comparable to a particular individual. In some embodiments, risk may reflect one or more genetic attributes, e.g., which may predispose an individual toward development (or not) of a particular disease, disorder and/or condition. In some embodiments, risk may reflect one or more epigenetic events or attributes and/or one or more lifestyle or environmental events or attributes.

[0359] Selective or specific: The term “selective” or “specific,” when used herein in reference to an agent having an activity, is understood by those skilled in the art to mean that the agent discriminates between potential target entities, states, or cells. For example, in some embodiments, an agent is said to bind “specifically” to its target if it binds preferentially with that target in the presence of one or more competing alternative targets. In many embodiments, specific interaction is dependent upon the presence of a particular structural feature of the target entity (e.g., an epitope, a cleft, a binding site). It is to be understood that specificity need not be absolute. In some embodiments, specificity may be evaluated relative to that of a target-binding moiety for one or more other potential target entities (e.g., competitors). In some embodiments, specificity is evaluated relative to that of a reference specific binding moiety. In some embodiments, specificity is evaluated relative to that of a reference non-specific binding moiety.

[0360] Substituted or optionally substituted: As described herein, compounds of the invention may contain “optionally substituted” moieties. In general, the term “substituted,” whether preceded by the term “optionally” or not, means that one or more hydrogens of the designated moiety are replaced with a suitable substituent. “Substituted” applies to one or more hydrogens that are either explicit or implicit from the structure (e.g.,

[chemical structure]

refers to at least

[chemical structure]

and refers to at least

[chemical structure]

Unless otherwise indicated, an “optionally substituted” group may have a suitable substituent at each substitutable position of the group, and when more than one position in any given structure may be substituted with more than one substituent selected from a specified group, the substituent may be either the same or different at every position. Combinations of substituents envisioned by this invention are preferably those that result in the formation of stable or chemically feasible compounds. The term “stable,” as used herein, refers to compounds that are not substantially altered when subjected to conditions to allow for their production, detection, and, in certain embodiments, their recovery, purification, and use for one or more of the purposes provided herein. Groups described as being “substituted” preferably have between 1 and 4 substituents, more preferably 1 or 2 substituents. Groups described as being “optionally substituted” may be unsubstituted or be “substituted” as described above.

[0361] Suitable monovalent substituents on a substitutable carbon atom of an “optionally substituted” group are independently halogen; —(CH₂)₀₋₄R^{∘}; —(CH₂)₀₋₄₀R^{∘}; —O(CH₂)₀₋₄R^{∘}, —O—(CH₂)₀₋₄C(O)OR^{∘}; —(CH₂)₀₋₄CH(OR^{∘})₂; —(CH₂)₀₋₄SR^{∘}; —(CH₂)₀₋₄Ph, which may be substituted with R^{∘}; —(CH₂)₀₋₄O(CH₂)₀₋₁Ph which may be substituted with R^{∘}; —CH═CHPh, which may be substituted with R^{∘}; —(CH₂)₀₋₄O(CH₂)₀₋₁-pyridyl which may be substituted with R^{∘}; —NO₂; —CN; —N₃; —(CH₂)₀₋₄N(R^{∘})₂; —(CH₂)₀₋₄N(R^{∘})C(O)R^{∘}; —N(R^{∘})C(S)R^{∘}; —(CH₂)₀₋₄N(R^{∘})C(O)NR^{∘}₂; —N(R^{∘})C(S)NR^{∘}₂; —(CH₂)₀₋₄N(R^{∘})C(O)OR^{∘}; —N(R^{∘})N(R^{∘})C(O)R^{∘}; —N(R^{∘})N(R^{∘})C(O)NR^{∘}₂; —N(R^{∘})N(R^{∘})C(O)OR^{∘}; —(CH₂)₀₋₄C(O)R^{∘}; C(S)R^{∘}; —(CH₂)₀₋₄C(O)OR^{∘}; —(CH₂)₀₋₄C(O)SR^{∘}; —(CH₂)₀₋₄C(O)OSiR^{∘}₃; —(CH₂)₀₋₄OC(O)R^{∘}; —OC(O)(CH₂)₀₋₄SR^{∘}; —(CH₂)₀₋₄SC(O)R^{∘}; —(CH₂)₀₋₄C(O)NR^{∘}₂; —C(S)NR^{∘}₂; —C(S)SR^{∘}; —SC(S)SR^{∘}, —(CH₂)₀₋₄₀C(O)NR^{∘}₂; —C(O)N(OR^{∘})R^{∘}; —C(O)C(O)R^{∘}; —C(O)CH₂C(O)R^{∘}; —C(NOR^{∘})R^{∘}; —(CH₂)₀₋₄SSR^{∘}; —(CH₂)₀₋₄S(O)₂R^{∘}; —(CH₂)₀₋₄S(O)₂OR^{∘}; —(CH₂)₀₋₄OS(O)₂R^{∘}; —S(O)₂NR^{∘}₂; —(CH₂)₀₋₄S(O)R^{∘}; —N(R^{∘})S(O)₂NR^{∘}₂; —N(R^{∘})S(O)₂R^{∘}; —N(OR^{∘})R^{∘}; —C(NH)NR^{∘}₂; —P(O)₂R^{∘}; —P(O)R^{∘}₂; —OP(O)R^{∘}₂; —OP(O)(OR^{∘})₂; SiR^{∘}₃; —(C₁₋₄ straight or branched alkylene)O—N(R^{∘})₂; or —(C₁₋₄ straight or branched alkylene)C(O)O—N(R^{∘})₂, wherein each R^{∘} may be substituted as defined below and is independently hydrogen, C₁₋₆ aliphatic, —CH₂Ph, —O(CH₂)₀₋₁Ph, —CH₂-(5- to 6-membered heteroaryl ring), or a 3- to 6-membered saturated, partially unsaturated, or aryl ring having 0-4 heteroatoms independently selected from nitrogen, oxygen, or sulfur, or, notwithstanding the definition above, two independent occurrences of R^{∘}, taken together with their intervening atom(s), form a 3- to 12-membered saturated, partially unsaturated, or aryl mono- or bicyclic ring having 0-4 heteroatoms independently selected from nitrogen, oxygen, or sulfur, which may be substituted as defined below.

[0362] Suitable monovalent substituents on R^{∘} (or the ring formed by taking two independent occurrences of R^{∘} together with their intervening atoms), are independently halogen, —(CH₂)₀₋₂R^{●}, -(haloR^{●}), —(CH₂)₀₋₂OH, —(CH₂)₀₋₂OR^{●}, —(CH₂)₀₋₂CH(OR^{●})₂, —O(haloR^{●}), —CN, —N₃, —(CH₂)₀₋₂C(O)R^{●}, —(CH₂)₀₋₂C(O)OH, —(CH₂)₀₋₂C(O)OR^{●}, —(CH₂)₀₋₂SR^{●}, —(CH₂)₀₋₂SH, —(CH₂)₀₋₂NH₂, —(CH₂)₀₋₂NHR^{●}, —(CH₂)₀₋₂NR^{●}₂, —NO₂, —SiR^{●}₃, —OSiR^{●}₃, —C(O)SR^{●}, —(C₁₋₄ straight or branched alkylene)C(O)OR^{●}, or —SSR^{●} wherein each R^{●} is unsubstituted or where preceded by “halo” is substituted only with one or more halogens, and is independently selected from C₁₋₄ aliphatic, —CH₂Ph, —O(CH₂)₀₋₁Ph, or a 3- to 6-membered saturated, partially unsaturated, or aryl ring having 0-4 heteroatoms independently selected from nitrogen, oxygen, or sulfur. Suitable divalent substituents on a saturated carbon atom of R^{∘} include ═O and ═S.

[0363] Suitable divalent substituents on a saturated carbon atom of an “optionally substituted” group include the following: ═O (“oxo”), ═S, ═NNR*₂, ═NNHC(O)R*, ═NNHC(O)OR*, ═NNHS(O)₂R*, ═NR*, ═NOR*, —O(C(R*₂))₂₋₃O—, or —S(C(R*₂))₂₋₃S—, wherein each independent occurrence of R* is selected from hydrogen, C₁₋₆ aliphatic which may be substituted as defined below, or an unsubstituted 5- to 6-membered saturated, partially unsaturated, or aryl ring having 0-4 heteroatoms independently selected from nitrogen, oxygen, or sulfur. Suitable divalent substituents that are bound to vicinal substitutable carbons of an “optionally substituted” group include: —O(CR*₂)₂₋₃O—, wherein each independent occurrence of R* is selected from hydrogen, C₁₋₆ aliphatic which may be substituted as defined below, or an unsubstituted 5-6-membered saturated, partially unsaturated, or aryl ring having 0-4 heteroatoms independently selected from nitrogen, oxygen, or sulfur.

[0364] Suitable substituents on the aliphatic group of R* include halogen, —R^{●}, -(haloR^{●}), —OH, —OR^{●}, —O(haloR^{●}), —CN, —C(O)OH, —C(O)OR^{●}, —NH₂, —NHR^{●}, —NR^{●}₂, or —NO₂, wherein each R^{●} is unsubstituted or where preceded by “halo” is substituted only with one or more halogens, and is independently C₁₋₄ aliphatic, —CH₂Ph, —O(CH₂)₀₋₁Ph, or a 3- to 6-membered saturated, partially unsaturated, or aryl ring having 0-4 heteroatoms independently selected from nitrogen, oxygen, or sulfur.

[0365] Suitable substituents on a substitutable nitrogen of an “optionally substituted” group include —R^{†}, —NR^{†}₂, —C(O)R^{†}, —C(O)OR^{†}, —C(O)C(O)R^{†}, —C(O)CH₂C(O)R^{†}, —S(O)₂R^{†}, —S(O)₂NR^{†}₂, —C(S)NR^{†}₂, —C(NH)NR^{†}₂, or —N(R^{†})S(O)₂Rt; wherein each R^{†} is independently hydrogen, C₁₋₆ aliphatic which may be substituted as defined below, unsubstituted—OPh, or an unsubstituted 3- to 6-membered saturated, partially unsaturated, or aryl ring having 0-4 heteroatoms independently selected from nitrogen, oxygen, or sulfur, or, notwithstanding the definition above, two independent occurrences of R^{†}, taken together with their intervening atom(s) form an unsubstituted 3- to 12-membered saturated, partially unsaturated, or aryl mono- or bicyclic ring having 0-4 heteroatoms independently selected from nitrogen, oxygen, or sulfur.

[0366] Suitable substituents on the aliphatic group of R^{†} are independently halogen, —R^{●}, -(haloR^{●}), —OH, —OR^{●}, —O(haloR^{●}), —CN, —C(O)OH, —C(O)OR^{●}, —NH₂, —NHR^{●}, —NR^{●}₂, or —NO₂, wherein each R^{●} is unsubstituted or where preceded by “halo” is substituted only with one or more halogens, and is independently C₁₋₄ aliphatic, —CH₂Ph, —O(CH₂)₀₋₁Ph, or a 3- to 6-membered saturated, partially unsaturated, or aryl ring having 0-4 heteroatoms independently selected from nitrogen, oxygen, or sulfur.

[0367] Subject: As used herein, the term “subject” refers to an organism to be administered with a composition described herein, e.g., for experimental, diagnostic, prophylactic, and/or therapeutic purposes. Typical subjects include animals (e.g., mammals such as mice, rats, rabbits, non-human primates, domestic pets, etc.) and humans. In some embodiments, a subject is a human subject. In some embodiments, a subject is suffering from a disease, disorder, or condition (e.g., HIV, an HIV-associated condition, etc.). In some embodiments, a subject is susceptible to a disease, disorder, or condition (e.g., HIV, an HIV-associated condition, etc.). In some embodiments, a subject displays one or more symptoms or characteristics of a disease, disorder, or condition (e.g., HIV, an HIV-associated condition, etc.). In some embodiments, a subject displays one or more non-specific symptoms of a disease, disorder, or condition (e.g., HIV, an HIV-associated condition, etc.). In some embodiments, a subject does not display any symptom or characteristic of a disease, disorder, or condition (e.g., HIV, an HIV-associated condition, etc.). In some embodiments, a subject is someone with one or more features characteristic of susceptibility to or risk of a disease, disorder, or condition (e.g., HIV, an HIV-associated condition, etc.). In some embodiments, a subject is a patient. In some embodiments, a subject is an individual to whom diagnosis and/or therapy is and/or has been administered.

[0368] Suffering from: An individual who is “suffering from” a disease, disorder, and/or condition (e.g., HIV, an HIV-associated condition, etc.) has been diagnosed with and/or displays one or more symptoms of a disease, disorder, and/or condition.

[0369] Susceptible to: An individual who is “susceptible to” a disease, disorder, and/or condition (e.g., HIV, an HIV-associated condition, etc.) is one who has a higher risk of developing the disease, disorder, and/or condition (e.g., HIV, an HIV-associated condition, etc.) than does a member of the general public. In some embodiments, an individual who is susceptible to a disease, disorder and/or condition (e.g., HIV, an HIV-associated condition, etc.) may not have been diagnosed with the disease, disorder, and/or condition (e.g., HIV, an HIV-associated condition, etc.). In some embodiments, an individual who is susceptible to a disease, disorder, and/or condition (e.g., HIV, an HIV-associated condition, etc.) may exhibit symptoms of the disease, disorder, and/or condition (e.g., HIV, an HIV-associated condition, etc.). In some embodiments, an individual who is susceptible to a disease, disorder, and/or condition (e.g., HIV, an HIV-associated condition, etc.) may not exhibit symptoms of the disease, disorder, and/or condition (e.g., HIV, an HIV-associated condition, etc.). In some embodiments, an individual who is susceptible to a disease, disorder, and/or condition (e.g., HIV, an HIV-associated condition, etc.) will develop the disease, disorder, and/or condition (e.g., HIV, an HIV-associated condition, etc.). In some embodiments, an individual who is susceptible to a disease, disorder, and/or condition (e.g., HIV, an HIV-associated condition, etc.) will not develop the disease, disorder, and/or condition (e.g., HIV, an HIV-associated condition, etc.).

[0370] Therapy: The term “therapy” refers to an administration or delivery of an agent or intervention that has a therapeutic effect and/or elicits a desired biological and/or pharmacological effect (e.g., has been demonstrated to be statistically likely to have such effect when administered to a relevant population). In some embodiments, a therapeutic agent or therapy is any substance that can be used to alleviate, ameliorate, relieve, inhibit, prevent, delay onset of, reduce severity of, and/or reduce incidence of one or more symptoms or features of a disease, disorder, and/or condition (e.g., HIV, an HIV-associated condition, etc.). In some embodiments, a therapeutic agent or therapy is a medical intervention (e.g., surgery, radiation, phototherapy) that can be performed to alleviate, relieve, inhibit, present, delay onset of, reduce severity of, and/or reduce incidence of one or more symptoms or features of a disease, disorder, and/or condition.

[0371] Treat: As used herein, the term “treat,” “treatment,” or “treating” refers to any method used to partially or completely alleviate, ameliorate, relieve, inhibit, prevent, delay onset of, reduce severity of, and/or reduce incidence of one or more symptoms or features of a disease, disorder, and/or condition (e.g., HIV, an HIV-associated condition, etc.). Treatment may be administered to a subject who does not exhibit signs of a disease, disorder, and/or condition (e.g., HIV, an HIV-associated condition, etc.). In some embodiments, treatment may be administered to a subject who exhibits only early signs of the disease, disorder, and/or condition (e.g., HIV, an HIV-associated condition, etc.), for example for the purpose of decreasing the risk of developing pathology associated with the disease, disorder, and/or condition. In some embodiments, treatment may be administered to a subject at a later-stage of disease, disorder, and/or condition (e.g., HIV, an HIV-associated condition, etc.).

### DETAILED DESCRIPTION OF CERTAIN EMBODIMENTS

### I. Human Immunodeficiency Virus (HIV)

[0372] Human Immunodeficiency Virus (HIV) is a lentivirus within the family Retroviridae. A mature HIV particle is generally round in shape and approximately 100 nm in diameter. It is composed of (from innermost to outermost) a core comprising of two identical single-stranded RNA molecules, a capsid, and an envelope (FIG. 1, Panel B) (Musumeci et al., Molecules 20.9 (2015): 17511-17532, which is herein incorporated by reference). The envelope is composed of a lipid bilayer and Env proteins. These Env proteins exist as trimers of gp120 surface protein anchored in the envelope membrane through a gp41 transmembrane protein. The viral capsid, surrounded by the envelope, comprises a symmetrical outer capsid membrane, which is made up of matrix protein p17. Within the outer capsid membrane is the conical capsid comprised of inner capsid protein p24. The inner capsid is attached to the outer capsid membrane at its tapered cone. The inner capsid contains the viral RNA (two identical copies) and viral enzymes: reverse transcriptase, integrase, and protease. Also contained with the viral particle are oligopeptides generated by proteolytic processing of Gag and Gag/Pol precursor proteins p55 and p160 that occurs during the maturation of the viral particle (GAC, Transfusion Medicine Hemotherapy, 43:203-222, 2016, which is herein incorporated by reference).

[0373] There are two main types of HIV, HIV-1 and HIV-2. HIV-1 is the most common type of HIV and accounts for 95% of all infections worldwide. HIV-2 is relatively uncommon and less infectious. HIV-2 is mainly concentrated in West Africa and the surrounding countries.

[0374] HIV-1 and HIV-2 have many similarities including their intracellular replication pathways, transmission modes and clinical effects leading to acquired immune deficiency syndrome (AIDS). However, HIV-2 is less likely to progress into AIDS because of its lower transmissibility. Thus, individuals infected by HIV-2 generally do not see disease progression for a long period of time, while patients infected by HIV-1 progress faster and tend to contract AIDS.

[0375] Once progression begins, however, the pathological process for both viruses is largely similar. One difference is that HIV-2 is found to progress at higher CD4 counts. Additionally, HIV-2 infections are characterized by lower viral loads of over 10,000 copies/mL compared to millions of copies/mL of HIV-1. A subject's immune response tends to be more protective in the case of HIV-2 infection, thus slowing down disease progression.

[0376] HIV-1 and HIV-2 are, in turn, further divided into groups and subtypes. HIV-1 is divided into main or M group, outlier or O group and non-M/O or N group. The most common group is group M, which is mostly responsible for the HIV epidemic worldwide. The other groups are relatively uncommon and are seen in select geographies including Gabon, Cameroon and Equatorial Guinea.

[0377] Group M is still further divided into genetically distinct subtypes: A, B, C, D, F, G, H, J and K. Some of these subtypes combine to form a hybrid virus called “circulating recombinant form.” Globally, subtype B accounts for 12% of HIV infections. Subtype B is the dominant HIV-1 subtype found in the Americas, Australasia, and Western Europe. As a result, most of the clinical research on HIV to date is focused on these populations.

[0378] Although subtype C represents almost 50% of all HIV affected individuals, less research has focused on this subtype. Subtype C is commonly found in countries in Southern Africa, where the incidence of HIV is very high. Cameroon and the Democratic Republic of Congo, the region of origin of HIV-1, have great diversity of HIV-1 subtypes. However, the pattern of subtype distribution across the globe is changing now, due to population mixing and migration.

[0379] There are about eight HIV-2 subtypes identified to date. The two main subtypes of HIV-2 that are considered epidemic are A and B. HIV-2 group A infections are mostly seen in West Africa, though a few cases have been reported in Brazil, Europe, US and India. HIV-2 group B infections have only been seen in West Africa.

[0380] Because HIV subtypes can be geographically diverse, ideal therapeutics are able to target and neutralize more than one subtype, and even more preferably, multiple strains of HIV. As discussed further below, anti-HIV antibodies capable of binding to and at least temporarily neutralizing HIV virions have been developed. Nonetheless, issues persist with such anti-HIV antibodies, including challenges with administration, antibody persistence in vivo, and viral escape. Polyribonucleotides and compositions of the present disclosure address these challenges, as described herein.

### A. HIV Genome

[0381] HIV contains two identical copies of single-stranded DNA encoding its genome. When the virus integrates into a host cell, reverse transcription of the viral RNA into double stranded DNA occurs, which leads to degradation of the RNA and integration of the double stranded DNA, or proviral DNA, into the host genome. The HIV genome is flanked at both ends by an LTR (long terminal repeat) region, including a 5′ LTR encoding a transcriptional promotor. The RNA genome is 9749 nucleotides and comprises a 5′ cap, a 3′ poly(A) tail, and several open reading frames ORFs (Wain-Hobson et al., Cell 40(1):9-17, 1985, which is herein incorporated by reference).

[0382] The HIV genome includes the following genes: gag, pol, vif, vpr, tat, rev, vpu, env, and nef (see FIG. 1, Panel A). The proteins encoded by gag, pol, and env are viral structural proteins. The proteins encoded by tat and rev are essential regulatory proteins. The proteins encoded by nef, vpr, vif, and vpu are accessory regulatory proteins. The gag gene encodes a P555Gag precursor protein of proteins of the outer core membrane (p17), the capsid protein (p24), the nucleoprotein (p7), Pr55Gag, and p6 protein. Protein p24 forms the conical capsid and protein p17 forms the inner membrane layer. Protein p6 is involved in viral particle release.

[0383] The pol gene encodes Pr160GagPol precursor protein, protease enzyme p10, reverse transcriptase (p51), and RNase H (p15) or both together as p66 protein, and integrase p32. Pr160GagPol is the precursor of the viral enzymes p10, p51, and p15. Proteolytic cleavage of Gag (Pr55) and Gag-Pol (Pr160GagPol) results in protease p10. Protein p51 reverse transcriptase is responsible for transcription of HIV RNA into proviral DNA. Protein p55 (RNAse H) functions to degrade viral RNA in the viral RNA/DNA complex when proviral DNA is generated. Protein p32 integrase functions in integrating proviral DNA into a host cell genome.

[0384] The env gene encodes precursor protein PrGp160 of two envelope glycoproteins gp120 (surface protein) and gp41 (transmembrane protein). Proteins gp120 and gp41 are generated by protease cleavage of precursor protein PrGp160. Protein gp120 functions in the attachment of the virus to a target host cell. Protein gp41 anchors gp120 into the viral membrane and functions to fuse the viral and target cell membrane.

[0385] The gene tat encodes Tat protein p14 (transactivator protein), which activates transcription of viral genes. The rev gene encodes Rev protein p19 (RNA splicing-regulator), which regulates export of mRNA (both non-spliced and partially spliced). The nef gene encodes Nef protein p27 (negative regulating factor), which functions in HIV replication and enhances the infectivity of the virus in a host cell. Protein p27 also functions to downregulate CD4 and HLA on target cells. The vif gene encodes Vif protein p23 (viral infectivity factor), which functions in the production of the virus in a host cell. The gene vpr encodes Vpr protein p15 (virus protein r). This protein interacts with p6 protein and facilitates infectivity of the virus in a host cell. The gene vpu encodes Vpu protein p16 (virus protein unique), which allows for efficient release of the viral particle and controls CD4 degradation on a target cell. Protein p16 also controls intracellular signaling. The gene vpx encodes Vpx protein p15 (virus protein x), which functions to interact with p6 protein and is important in the early phases of viral replication. The gene tev encodes Tat/Rev protein p26, which is a fusion protein that regulates Tat and Rev proteins (GAC, Transfusion Medicine Hemotherapy, 43:203-222, 2016, which is herein incorporated by reference).

### B. Lifecycle

[0386] The lifecycle of HIV involves HIV virion entry into a target host cell, reverse transcription of the viral genome, integration into the host genome, and protein maturation. To initiate infection, an HIV particle comes into contact with a target host cell. Surface glycoprotein env gp120 of a mature HIV particle binds to a CD4 receptor on the target host cell, which initiates the additional binding of gp120 to a co-receptor, i.e., chemokine receptor 5 (CCR5) or chemokine receptor 4 (CXCR4 of fusin). Binding of gp120 to CD4 and the co-receptor triggers a conformational change of gp120 so that gp41 is presented on the viral membrane and can fuse with the plasma membrane of the target host cell. The viral capsid then enters the cytoplasm of the host cell. The capsid is taken up by an endosome releases its contents, i.e., the viral RNA. Upon entry and release of the virus into the target host cell, the virus undergoes reverse transcription, where the viral RNA is reverse transcribed into single stranded cDNA. The RNA strand is then degraded by RNase H, and the single stranded cDNA is converted to double stranded DNA by DNA-dependent DNA polymerase activity by the reverse transcriptase enzyme.

[0387] The double-stranded DNA, or proviral DNA, forms a complex with integrase and is transported into the nucleus of the host cell, and inserts itself at random into the host cell genome. Once integrated into the genome, the proviral genome is replicated. The proviral genome can be replicated with the host cell genome as part of cell division or can replicate using its own machinery. For example, the LTR promotor creates an attachment site for cellular DNA-dependent RNA polymerases and transcription factors to initiate transcription. Transcription of proviral DNA is accelerated by the Tat protein.

[0388] The process of entry into a target host cell, reverse transcription, integration and protein maturation can be completed in less than 24 hours, and progeny viral particles have been detected within 12 hours of infection. The first progeny viral particles after infection may be released from the infected cells about 24 hours after infection. Infected T cells are typically eliminated at a rate of 2-4 days by the immune system (e.g., by cytotoxic T cells). As HIV infected T cells are destroyed and production of T cells is limited, there is a decline in T helper cells. The proteins nef and tat also inhibit maturation and replacement of helper T cells. As a result, an HIV infection over time will result in immunodeficiency (GAC, Transfusion Medicine Hemotherapy, 43:203-222, 2016, which is herein incorporated by reference).

### C. Transmission and Pathology

[0389] HIV enters the body through intact mucous membranes, injured skin or by parenteral inoculation. HIV is most commonly transmitted sexually. Upon infection, HIV can be detected throughout the body by about 10-14 days, and transmission via blood or transplanted organs is possible after about 5-6 days post infection. Clinical symptoms typically manifest after 3-6 weeks post infection and can include fever, lymph node enlargement, fatigue, rash, gastrointestinal symptoms, acute neuropathy, myalgias and/or malaise. However, during this acute phase some individuals are asymptomatic. These symptoms of the acute or primary infection can persist for 2-6 weeks. This initial symptomatic phase is then typically followed by an asymptomatic phase or one with occasional symptoms, which can last several years.

[0390] Left untreated, HIV infection causes progressive CD4+ T cell loss, which can lead to a suite of immunological abnormalities and an increased risk of infectious and oncological complications. Additionally, HIV infection also implicates cardiovascular disease, bone disease, renal and hepatic dysfunction, and several other common morbidities.

[0391] Although antiviral therapies (ART) have been developed to treat HIV infection, ART can only prevent new cells from becoming infected, i.e., ART cannot eliminate infection if a cell already contains viral DNA integrated into its genome. Additionally, HIV establishes a latent infection in CD4+ T cells that can be maintained indefinitely, some having the capability of self-renewal. HIV may continue to reinitiate replication in a cell once it is integrated into its genome. (Deeks et al. Nature reviews 1.1 2015 and GAC, Transfusion Medicine Hemotherapy, 43:203-222, 2016 which are herein incorporated by reference).

### D. Therapeutic Strategies

[0392] Development of therapeutics targeting HIV face many challenges. One challenging factor is the heterogeneity of the virus. HIV can be divided into at least two major types (HIV-1, found worldwide, and HIV-2, found largely in west Africa), while HIV-1 has been further subdivided into three subgroups (M, N, O and P), and M has been still further subdivided into subtypes A-L. Subtypes are also able to recombine upon co-infection, resulting in yet further recombinant subtypes.

[0393] Another challenging factor is that the high mutation rate of HIV in vivo. A recent study quantified the HIV-1 genome-wide rate of spontaneous mutation in DNA sequences from peripheral blood mononuclear cells and revealed an extremely high mutation rate of (4.1±1.7)×10⁻³ per base per cell, which is the highest rate reported for any biological entity (Cuevas et al, PloS Biol 2015, which is herein incorporated by reference). The ability to identify and develop a therapeutic targeting a conserved epitope across the multiple groups and subtypes of a continuously mutating HIV sequence is therefore extremely challenging, and the virus has a unique ability to evade the immune system.

[0394] Aside from the high mutational frequency, HIV presents other challenges for the immune system that make it uniquely challenging to treat. Therapeutic targets on HIV include the HIV envelop protein (HIV Env), however, the HIV Env is heavily glycosylated and the Env sites are therefore shielded from a therapeutic by the glycans present. Additionally, Env glycans are derived from the host and can be extremely heterogeneous.

[0395] A recent therapeutic strategy involves use of broadly neutralizing antibodies (bNAbs), which are antibodies that can neutralize a diversity of global HIV isolates. Such antibodies have been identified from individuals infected by HIV considered to be “Elite Neutralizers,” making up<10% of HIV patients (Burton and Hangartner, Ann. Rev. Immunol. 2016, which is herein incorporated by reference). Such antibodies provide insights for potential target epitopes and structures of therapeutics. Other advances to aid the advance of therapeutics include the generation of a stable HIV Env spike trimer (Sanders and Moore, Immunol. Rev. 2017, which is herein incorporated by reference) and characterization of its structure at high resolution (Ward and Wilson, Immunol. Rev. 2017, which is herein incorporated by reference). Examples of Env sites that are potential targets include the apex site, the high-mannose patch of the gp120 region, the gp120-gp41 interface region, the gp41 membrane proximal region (MPER), and the CD4 binding site (see FIG. 2, from McCoy and Burton, Immunol Rev. 275.1 11-20 2017, which is herein incorporated by reference). These sites each face unique challenges as a therapeutic target for bnAbs. For example, bnAbs that target the gp41-gp120 interface must be able bind to complex heterogeneous glycans. BnAbs that target the CD4 binding site of the Env protein have been found to show high levels of somatic hypermutation.

[0396] Nonetheless, among these sites, the apex site is of particular interest because it is a conserved region identified in the HIV envelop trimer (Env).

[0397] As discussed herein, the HIV-1 envelope (Env) glycoprotein trimer, which is a trimer of gp120-gp41 heterodimers, is the only viral protein on the surface of HIV-1 virons and are therefore an important target of bnAbs. The apex of Env trimer includes the variable 1 and 2 (V1V2) loops and the variable 3 (V3) loop. The V1V2 loops contain four β-strands. Additionally, the V1V2 epitope is of particular interest as a target because it is a region of gp120 that upon binding with CD4, undergoes large conformational changes. For example, CD4 and gp120 interaction stabilizes an open Env conformation that is able to interact with a chemokine receptor to cause additional conformation changes that ultimately results in insertion of the gp41 fusion protein into a target cell membrane. In the closed state, V1V2 regions from the three gp120s shield the V3 and coreceptor binding site. As such, certain apex-targeting bNAbs (e.g., targeting V1V2 epitopes) are characterized by the ability to prevent the opening of the Env trimer to expose the V3 lop and coreceptor binding site, thereby blocking conformational changes that lead to fusion of the viral and target host cell membranes (see Wang, Haoqing, et al., “Asymmetric recognition of HIV-1 Envelope trimer by V1V2 loop-targeting antibodies.” Elife 6 (2017): e27389, which is herein incorporated by reference).

[0398] The present disclosure provides, among other things, polyribonucleotides that encode antibody agents, e.g., bNABs, that target a broader group of HIV variants, and as such and are able to treat a greater number of HIV patients. Additionally, the present disclosure provides compositions for the delivery of polyribonucleotides that encode antibody agents, e.g., bNABs, targeting various HIV sequences.

### 1. Anti-Viral Treatments for HIV

[0399] HIV infection is currently primarily treated with antiretroviral therapy (ART). ART is a type of drug that can reduce HIV multiplication, increase CD4 cell count, and reduce transmission risk in an infected individual. The World Health Organization (WHO) recommends that ART be initiated in all adults infected with HIV regardless of clinical stage or CD4 cell count (Consolidated guidelines on HIV prevention, testing, treatment, service delivery and monitoring: recommendations for a public health approach. Geneva: World Health Organization; 2021, which is herein incorporated by reference). However, ART is not a curative therapy, and viremia (e.g., viral load) will quickly rebound if an infected individual stops taking ART. The high mutation rate of HIV also constrains patient in having a strict observance with their therapy to avoid the emergence of escape mutants and treatment failure. Thus, ART is intended to be taken every day for the entirety of an infected subject's life.

[0400] There are several classes of FDA-approved ART to treat HIV that act via different mechanisms. Effective management of HIV infection often involves combinations of at least 3 ARTs to treat the complex pathogenicity of the disease. The most effective combination of ARTs is often different between infected individuals (see, for example, Bhatti et al., Cureus 2016, which is herein incorporated by reference). Cihlar et al., Current opinion in virology, 2016, hereby incorporated by reference in its entirety, reviews the classes of ART drugs for the treatment of HIV.

TABLE 1
Exemplary classes of ART used to treat HIV, mechanisms
of action, and exemplary compounds in each class

| ART Class | Mechanism of Action | Examples |
|---|---|---|
| CCR5 Antagonist | Inhibits HIV entry into cell by | Maraviroc |
| | blocking CCR5 and viral interaction | |
| Fusion Inhibitors | Inhibits HIV envelope from | Enfuvirtide |
| | merging with host cell membrane | |
| Integrase Strand Transfer Inhibitor | Inhibits integration of viral DNA | Bictegravir, Dolutegravir, |
| (INSTI) | into host genome by blocking | Elvitegravir, Raltegravir |
| | integrase enzyme | |
| Non-Nucleoside Reverse | Inhibits HIV replication by blocking | Delavirdine, Doravirine, Efavirenz, |
| Transcriptase Inhibitors (NNRTI) | reverse transcriptase enzyme to | Etravirine, Nevirapine, Rilpivirine, |
| | suppress conversion of RNA into | |
| | DNA | |
| Nucleoside Reverse Transcriptase | Inhibits HIV replication by blocking | Abacavir, Emtricitabine, |
| Inhibitors (NRTI) | reverse transcriptase enzyme to | Lamivudine, Tenofovir, Zidovudine |
| | suppress conversion of RNA into | |
| | DNA | |
| Post-Attachment Inhibitor | Inhibits HIV entry into cell after | Ibalizumab |
| | binding has occurred | |
| Protease Inhibitors | Inhibits HIV particle development | Atazanavir, Darunavir, |
| | and maturity by blocking protease | Fosamprenavir, Lopinavir, |
| | enzyme | Nelfinavir, Ritonavir, Tipranavir |

### 2. HIV Antibody Agents

[0401] In addition to ART, anti-HIV antibodies have been developed. Using anti-HIV antibodies for treating HIV generally requires antibodies having specific characteristics, including safety, a favorable pharmacokinetic profile, highly potent neutralizing activity, and broad neutralizing activity to effectively target the diversity present in HIV virions. As with other HIV therapeutics (including, e.g., ART), viral escape from anti-HIV antibodies present as significant challenge.

[0402] For example, Barouch, et al. infected rhesus macaques with SHIV-SF162P3 (Barouch, et al., Nature 503: 7475 224-228, 2013), which is incorporated herein by reference in its entirety. The rhesus macaques were then treated with 3 monoclonal antibodies (mAbs): N332 glycan-dependent mAb PGT121 and CD4 binding site-specific mAbs 3BNC117 and b12. mAbs were administered as a cocktail on days 0 and 7 at 10 mg/kg each, as a cocktail on day 0 alone at 10 mg/kg each or as a combination of just PGT121 and 3BNC117 at 10 mg/kg each. Transient viral suppression was observed until bNAbs level dropped below 10 μg/mL. mAbs were also singly administered to macaques, and PGT121 alone resulted in rapid virologic control which rebounded after 6-8 weeks in most animals. The macaques that received a combination of PGT121 and 3BNC117 were given a second dose on day 105, after viral levels had rebounded. Viral re-suppression was observed, although the control was less durable than the previous administration.

[0403] Shingai, et al. describes rhesus macaques were infected with SHIV_{AD8EO} (Shingai, et al., Nature 503: 7475 277-280, 2013, which is incorporated herein by reference in its entirety). The rhesus macaques were then treated with 10-1074 and 3BNC117 mAbs singly or in combination. When administered singly at 12 weeks post inoculation at 10 mg/kg, both antibodies caused rapid viral suppression, but virus levels quickly rebounded. Administration of both antibodies in combination to chronically infected animals resulted in longer periods of suppression and increased CD4+ T cell levels, although viral levels did rebound later. In other studies, both antibodies were singly pre-treated to macaques and were found to prevent virus acquisition. Single genome analysis of rebounded virus in 10-074 treated macaques revealed mutations that eliminated the gp120 N332 glycan, rendering resistance to the mAb. However, SGA analysis of rebounded virus in macaques treated with both 10-074 and 3BNC117 revealed that not all of the macaques contained virus with changes that imparted mAb resistance.

[0404] Caskey, et al. describe a first-in-human dose escalation phase 1 clinical trial of 3BNC117 (CD4 binding site antibody) (Caskey, et al., Nature 522.7557: 487-491, 2015, which is incorporated herein by reference in its entirety). Uninfected and HIV-1-infected individuals were enrolled in the trial. 1, 3, 10, or 30 mg/kg doses of 3BNC117 were found to be generally safe and well tolerated; no grade 3, 4, or serious adverse events were observed. HIV-1-infected individuals were observed to have a quicker clearance rate of the antibody than uninfected control subjects. The effect of the treatment on viral load was dose-dependent; 10 and 30 mg/kg doses decreased viral load by up to 2.5 log. Viral resistance was observed to develop in some individuals regardless of mAb dose, but not in other individuals. Viruses were cloned and sequenced, G459D was a commonly observed mutation in the 10 mg/kg group, others showed a longer V5 loop (other mutations described). Both mutations can alter sensitivity to anti-CD4bs.

[0405] Caskey, et al. also assessed 10-074, which is a highly potent mAb that targets the V3 loop of the HIV-1 envelope spike (Caskey et al., Nature Medicine 23.2: 185-191, 2017), which is incorporated herein by reference in its entirety. An open label phase 1 first-in-human clinical trial was performed with 14 uninfected and 19 HIV-1-infected individuals. A single intravenous infusion was administered at 3, 10, or 30 mg/kg. The mAb was found to be generally safe and well-tolerated; no grade 3, 4, or serious adverse events were observed. HIV-1-infected individuals were observed to have a quicker clearance rate of the antibody than uninfected controls. Treatment suppressed viral load in individuals with 10-074 sensitive strains, followed by rebound. Single genome sequencing (SGS) of rebounded virus revealed all patients that responded to treatment displayed a PNGS at position N332 and an intact ³²⁴G(D/N)IR³²⁷ motif. Four weeks after infusion, 91% of envelope sequences contained amino acid mutations, 97% of which eliminated the PNGS at position 332 by mutating either N332 or S334. 3% of mutated sequences showed changes at D/N325 in the ³²⁴G(D/N)IR³²⁷ motif. Majority of mutations at nucleic acid level were transitions, consistent with reverse transcriptase errors. Neutralization assay testing showed that mutated HIV-1 resistant to 10-074 was not resistant to 3BNC117, VRC01, or PGDM1400 (mAbs targeting other regions of HIV-1). SGS performed 1 week after infusion revealed that resistant variants are preexisting or rapidly generated.

[0406] Bar, et al. performed two open-lab trials, which were conducted on the safety, side-effect profile, pharmacokinetic properties, and antiviral activity of VRC01 (bNAb targeting CD4-binding site of HIV) in patients undergoing interruption of antiretroviral therapy (ART) (Bar et al., New England Journal of Medicine 375.21: 2037-2050, 2016, which is incorporated herein by reference in its entirety). In one trial, 40 mg/kg was infused 3 times over a 6 week period, and in the other trial, 40 mg/kg was infused 8 times over a 6 month period. Treatment was well tolerated, no grade 3 or higher adverse events were observed. Neither trial produced durable suppression of plasma viremia, although a slight increase in time to rebound was found relative to historical controls. Regardless of time to rebound, resistance to VRC01 increased almost universally in participants in one trial. Viral isolates showed greater resistance to VRC01 neutralization in pre-treated samples versus post-treated. Treatment with VRC01 did not impact the susceptibility to neutralization with other bNAbs.

[0407] Mendoza, et al. performed a phase 1b clinical trial assessing the combination of 3BNC117 and 10-1074, which were infused at 30 mg/kg dose on weeks 0, 3, and 6 (Mendoza, et al., Nature 561.7724: 479-484, 2018, which is incorporated herein by reference in its entirety). These two bNAbs target independent sites on HIV-1 envelope spike. Infusions were generally found to be safe and well tolerated with no reported serious adverse events. Median time to rebound was significantly extended with combination bNAb treatment. Two earliest rebounder individuals were found to previously harbor strains resistant to one or the other bNAb. Rebounded virus clustered within low diversity lineages consistent with expansion of 1-2 recrudescent viruses (escape). Most rebounded virus was found to contain 10-1074 mutations as compared to 3BNC117 mutations. However, combination bNAb therapy proved more effective at containing viral escape than single bNAb treatment.

[0408] Gautam, et al. assayed rhesus macaques that were infected with SHIV_{AD8EO} and treated with 3BNC117-LS and 10-074-LS mAbs (Gautam, Rajeev, et al., Nature Medicine 24.5: 610-616, 2018, which is incorporated herein by reference in its entirety). M428L and N343S (collectively referred to as LS) are mutations in the fragment domains of the mAbs to increase half-life. The LS mutations had no effect on virus neutralization in in vitro assays. LS mAbs were administered singly at 20 mg/kg, and were well tolerated in all monkeys. 10-1074-LS recipients demonstrated increased protection from virus acquisition than 3BNC117-LS recipients, but LS mutations in both antibodies were more effective than WT. 10-1074-LS decayed at a slower rate than 3BNC117-LS in serum. mAb concentration/neutralization activity were determined to be predictive of the probability of infection. Only experiments in which antibody pre-treatment followed by virus challenge were performed.

[0409] Schommers, et al. characterized an anti-HIV antibody, referred to as “1-18,” in in vitro assays, as well as HIV-1 infected humanized mice. 1-18 was reported to bind to the CD4 binding site of HIV and have strong potency and breadth against HIV strains. Schommers reported that 1-18 had certain characteristics previously found in other anti-HIV antibodies, which seemed to contribute to 1-18's potency and breadth: (1) 1-18 has an aromatic residue that mimics residue Phe43 of CD4 to target the “Phe43gp120 pocket,” a characteristic previously reported for the anti-HIV antibody, N6; (2) 1-18 contacts with the adjacent gp120 protomer, as previously observed with the anti-HIV antibody, 3BNC117, but with increased buried surface area (via its six-residue insertion in CDRH1); and (3) a larger buried surface area on gp120 than other the anti-HIV antibodies. In addition, 1-18 was reported to contact conserved residues on HIV gp120 that other anti-HIV antibodies did not contact. Schommers hypothesized that these contacts may allow 1-18 to rely less on classical CD4 binding site contacts, which may make viral escape more difficult. Nonetheless, Schommers observed that a small number of HIV strains was found to be 1-18 resistant.

[0410] Sok et al., reported that PGDM1400 antibodies showed exceptional potency (a median IC50 of 0.003 μg/ml) against a 106-virus panel, as compared with other bNAbs (e.g., PGT121, PGT128, and PGT151). Additionally, PGDM1400 antibodies were shown to also have a high neutralization breadth (83% coverage) (see Sok, Devin, et al., “Recombinant HIV envelope trimer selects for quaternary-dependent antibodies targeting the trimer apex.” Proceedings of the National Academy of Sciences 111.49 (2014): 17624-17629; van der Velden, Yme U., et al. “Diverse HIV-1 escape pathways from broadly neutralizing antibody PGDM1400 in humanized mice.” Mabs. 12.1 (2020) e1845908, which are incorporated herein by reference in their entirety).

[0411] Together, the above data suggest that administration of antibodies can be effective for treating or preventing HIV. However, the difficulties with targeting such a mutable virus are evident from the studies above, as well as studies showing that (1) when a single broadly neutralizing antibody (bNAb) was used for therapy, HIV resistance to the therapy developed within a few weeks (Bar et al, Effect of HIV Antibody VRC01 on Viral Rebound after Treatment Interruption, N. Engl. J. Med. 375, 2037-2050 (2016); Caskey et al, Viraemia suppressed in HIV-1-infected humans by broadly neutralizing antibody 3BNC117. Nature 522, 487-491 (2015); Caskey et al, Antibody 10-1074 suppresses viremia in HIV-1-infected individuals. Nat. Med. 23, 185-191 (2017); Klein et al, HIV therapy by a combination of broadly neutralizing antibodies in humanized mice, Nature 492, 118-122 (2012); Lynch et al, Virologic effects of broadly neutralizing antibody VRC01 administration during chronic HIV-1 infection, Sci. Transl. Med. 7, 319ra206 (2015); Scheid et al, HIV-1 antibody 3BNC117 suppresses viral rebound in humans during treatment interruption, Nature 535, 556-560 (2016), each of which is herein incorporated by reference in its entirety), and (2) certain antibody combinations resulted in improved viral control by preventing early development of resistance (Bar-On et al, Safety and antiviral activity of combination HIV-1 broadly neutralizing antibodies in viremic individuals, Nat. Med. 24, 1701-1707 (2018); Klein et al, 2012; Mendoza et al, Combination therapy with anti-HIV-1 antibodies maintains viral suppression, Nature 561, 479-484 (2018), each of which is herein incorporated by reference in its entirety). The viral rebound observed with some of these antibodies suggests that the antibodies may only be effective for a limited time, e.g., prior to HIV escape mutations developing.

[0412] Accordingly, treatments and prophylactic therapeutics that can avoid viral escape and remain effective for HIV neutralization are still needed. As discussed herein, the present disclosure provides technologies useful for administering polyribonucleotides encoding one or more antibody agents, e.g., anti-HIV antibody agents, to a subject. Use of the technologies and approaches described herein allows for, e.g., simultaneous production of different antibody agents from polyribonucleotides. The formats of antibody agents have been designed to minimize or eliminate the risk of immunoglobulin chain mispairing. Being able to combine multiple antibody agent formulations as described herein (e.g., including a PGDM1400 antibody agent) allows for the development of a composition (e.g., a pharmaceutical composition) that delivers multiple antibody agents together so that they can bind different epitopes of the HIV virus, thereby minimizing viral escape through mutations and increasing overall efficacy.

### II. Polyribonucleotides for Delivery of Antibody Agents

[0413] The present disclosure, among other things, utilizes RNA technologies as a modality to express antibody agents directly in a subject as a novel class of antibody-based therapeutics. In some embodiments, a polyribonucleotide as described herein encodes an immunoglobulin chain of an antibody agent.

[0414] In some embodiments, an antibody agent targets HIV. In some embodiments, an antibody agent targeting HIV specifically binds to particular epitope of an HIV polypeptide. For example, in some embodiments, an antibody agent specifically binds to an epitope encompassing the Env trimer apex or a portion thereof. See FIG. 2, from McCoy and Burton, Immunol Rev. 275.1 11-20, 2017, which is herein incorporated by reference.

[0415] In some embodiments, an antibody agent may have a binding affinity (e.g., as measured by a dissociation constant) for an HIV epitope (e.g., an epitope of the Env trimer apex) of at least about 10⁻⁴M, at least about 10⁻⁵M, at least about 10⁻⁶M, at least about 10⁻⁷M, at least about 10⁻⁸M, at least about 10⁻⁹M, or lower. In some embodiments, an HIV antibody agent selectively binds a target epitope of HIV such that binding between the HIV antibody agent and the target epitope is greater than 2-fold, greater than 5-fold, greater than 10-fold, or greater than 100-fold as compared with binding of the HIV antibody agent to a non-target epitope. In some embodiments, an HIV antibody agent may have binding affinity for an HIV epitope and also variants of said HIV epitope. Those skilled in the art will appreciate that, in some cases, binding affinity (e.g., as measured by a dissociation constant) may be influenced by non-covalent intermolecular interactions such as hydrogen bonding, electrostatic interactions, hydrophobic and Van der Waals forces between the two molecules. Alternatively or additionally, binding affinity between a ligand and its target molecule may be affected by the presence of other molecules. Those skilled in the art will be familiar with a variety of technologies for measuring binding affinity and/or dissociation constants in accordance with the present disclosure, including, e.g., but not limited to ELISAs, gel-shift assays, pull-down assays, equilibrium dialysis, analytical ultracentrifugation, surface plasmon resonance (SPR), bio-layer interferometry, grating-coupled interferometry, and spectroscopic assays.

[0416] In some embodiments, an antibody agent targeting HIV may comprise or be derived from a broadly neutralizing antibody (bNAb). In some embodiments, an antibody agent targeting HIV may be any one of the HIV-targeting antibodies described in Sok, et al., PNAS 111.49: 17624-17629, 2014; van der Velden, Yme U., et al. Mabs. 12.1: e1845908, 2020, Barouch, et al., Nature 503: 7475 224-228, 2013, Shingai, et al., Nature 503: 7475 277-280, 2013, Caskey, et al., Nature 522.7557: 487-491, 2015, Caskey et al., Nature Medicine 23.2: 185-191, 2017, Bar et al., New England Journal of Medicine 375.21: 2037-2050, 2016, Mendoza, et al., Nature 561.7724: 479-484, 2018, Gautam, Rajeev, et al., Nature Medicine 24.5: 610-616, 2018, the contents of each of which are incorporated herein by reference in their entirety for the purposes described herein.

[0417] In some embodiments, an antibody agent targeting HIV may be e.g., 1-18, PGT121, 3BNC117, b12, 10-1074, 10E8, 10E8v4, VRC01, VRC07-523-L/S, PGDM1400, fragments thereof, or combinations thereof. Exemplary anti-HIV antibodies that can be used in compositions described herein include, but are not limited to, 1-18, PGT121, 3BNC117, b12, 10-1074, 10E8, 10E8v4, VRC01, VRC07-523-L/S, PGDM1400, fragments thereof, or combinations thereof. For example, in some embodiments, a polyribonucleotide as described herein can comprise one or more heavy chain complementarity determining regions (HCDRs) (e.g., HCDR1, HCDR2, and/or HCDR3) from 1-18, PGT121, 3BNC117, b12, 10-1074, 10E8, 10E8v4, VRC01, VRC07-523-L/S, or PGDM1400. In some embodiments, a polyribonucleotide as described herein can comprise HCDR1, HCDR2, and HCDR3 from 1-18, PGT121, 3BNC117, b12, 10-1074, 10E8, 10E8v4, VRC01, VRC07-523-L/S, or PGDM1400. In some embodiments, a polyribonucleotide as described herein can comprise a heavy chain variable domain from 1-18, PGT121, 3BNC117, b12, 10-1074, 10E8, 10E8v4, VRC01, VRC07-523-L/S, or PGDM1400. In some embodiments, a polyribonucleotide as described herein can comprise one or more light chain complementarity determining regions (LCDRs) (e.g., LCDR1, LCDR2, and/or LCDR3) from 1-18, PGT121, 3BNC117, b12, 10-1074, 10E8, 10E8v4, VRC01, VRC07-523-L/S, or PGDM1400. In some embodiments, a polyribonucleotide as described herein can comprise LCDR1, LCDR2, and LCDR3 from 1-18, PGT121, 3BNC117, b12, 10-1074, 10E8, 10E8v4, VRC01, VRC07-523-L/S, or PGDM1400. In some embodiments, a polyribonucleotide as described herein can comprise a light chain variable domain from 1-18, PGT121, 3BNC117, b12, 10-1074, 10E8, 10E8v4, VRC01, VRC07-523-L/S, or PGDM1400.

[0418] In some embodiments, a plurality of polyribonucleotides that each encode an immunoglobulin chain of an antibody agent can be used to deliver (e.g., by administration to a subject) two or more antibody agents (e.g., 1-18, PGT121, 3BNC117, b12, 10-1074, 10E8, 10E8v4, VRC01, VRC07-523-L/S, or PGDM1400, or fragments or variants thereof). In some embodiments, a plurality of polyribonucleotides that each encode an immunoglobulin chain of an antibody agent can be used to deliver (e.g., by administration to a subject) three or more antibody agents (e.g., 1-18, PGT121, 3BNC117, b12, 10-1074, 10E8, 10E8v4, VRC01, VRC07-523-L/S, or PGDM1400, or fragments or variants thereof). In some embodiments, a plurality of polyribonucleotides that each encode an immunoglobulin chain of an antibody agent can be used to deliver (e.g., by administration to a subject) four or more antibody agents (e.g., 1-18, PGT121, 3BNC117, b12, 10-1074, 10E8, 10E8v4, VRC01, VRC07-523-L/S, or PGDM1400, or fragments or variants thereof). In some embodiments, a plurality of polyribonucleotides that each encode an immunoglobulin chain of an antibody agent can be used to deliver (e.g., by administration to a subject) two, three, four, five or six antibody agents (e.g., 1-18, PGT121, 3BNC117, b12, 10-1074, 10E8, 10E8v4, VRC01, VRC07-523-L/S, or PGDM1400, or fragments or variants thereof). In some embodiments, an antibody agent encoded by one or more polyribonucleotides described herein includes all or part of a PGDM1400 antibody.

[0419] Antibody agents (e.g., PGDM1400 antibody agents), as described herein, may be characterized by the amino acid sequence of one of more domains within their antibody structure. For example, an antibody agent can comprise at least one heavy (H) chain and at least one light (L) chain interconnected, e.g., by disulfide bonds. Each H chain comprises a heavy chain variable region (abbreviated herein as VH) and a heavy chain constant region. Each light chain comprises a light chain variable region (abbreviated herein as VL) and a light chain constant region. The variable regions of each light/heavy chain (VL/VH) pair form the antigen-binding domain.

[0420] Within each light or heavy chain variable domain, there are three short segments called the complementarity determining regions (“CDRs”). The six CDRs in an antibody variable domain (three in the light chain variable domain and three in the heavy chain variable domain) fold up together in 3-dimensional space to form the actual antibody binding site. The terms “LCDR1,” “LCDR2” and “LCDR3” as provided herein refer to the complementarity determining regions (CDR) 1, 2, and 3 of the variable light (L) chain of an antibody agent. In some embodiments, the light chain variable domain provided herein includes in N-terminal to C-terminal direction a LCDR1, a LCDR2 and a LCDR3. Likewise, the terms “HCDR1,” “HCDR2” and “HCDR3” as provided herein refer to the complementarity determining regions (CDR) 1, 2, and 3 of the variable heavy (H) chain of an antibody agent. In certain embodiments, the heavy chain variable domain provided herein includes in N-terminal to C-terminal direction a HCDR1, a HCDR2 and a HCDR3.

[0421] Also within the variable region, but not contained within the CDRs, are regions called the framework regions (“FR”). Thus, the complementarity determining regions (CDRs) are interspersed with the framework regions. Accordingly, each VH and VL comprises three CDRs and four FRs, arranged from amino-terminus to carboxy-terminus in the following order: FR1, CDR1, FR2, CDR2, FR3, CDR3, and FR4. Generally, framework regions are more conserved than variable regions across naturally produced antibodies.

[0422] PGDM1400 antibodies, including their nucleotide and amino acid sequences, are disclosed in WO2021/087015 and U.S. Pat. No. 10,093,720, which are herein incorporated by reference in their entirety.

[0423] In some embodiments, a PGDM1400 antibody agent comprises an HCDR1, an HCDR2, and an HCDR3 of the heavy chain variable domain having an amino acid sequence SEQ ID NO: 36. In some embodiments, an PGDM1400 antibody agent comprises an LCDR1, and LCDR2, and an LCDR3 of the light chain variable domain having an amino acid sequence SEQ ID NO: 43.

[0424] The positions of the CDRs and framework regions within the VH and VL domains of an antibody agent described herein (e.g., a PGDM1400 antibody agent) can be determined using various numbering systems known in the art, e.g., Kabat, Chothia, AbM and IMGT (see, e.g., Johnson et al., Nucleic Acids Res., 29:205-206 (2001); Chothia and Lesk, J. Mol. Biol., 196:901-917 (1987); Chothia et al., Nature, 342:877-883 (1989); Chothia et al., J. Mol. Biol., 227:799-817 (1992); AI-Lazikani et al., J. Mol. Biol., 273:927-748 (1997) ImMunoGenTics (IMGT) numbering; Lefranc, M.-P., The Immunologist, 7, 132-136 (1999); Lefranc, M. P. et al., Dev. Comp. Immunol., 27, 55-77 (2003), each of which is incorporated herein by reference). Accordingly, CDRs within PGDM1400 antibody agents within the same VH or VL domain can be determined by different numbering systems.

[0425] In some embodiments, an antibody agent (e.g., a PGDM1400 antibody agent) comprises HCDR1, HCDR2, and HCDR3 amino acid sequences of the heavy chain variable domain represented by amino acid sequence SEQ ID NO: 36 according to Kabat numbering. In some embodiments, an antibody agent (e.g., a PGDM1400 antibody agent) comprises HCDR1, HCDR2, and HCDR3 amino acid sequences of the heavy chain variable domain represented by amino acid sequence SEQ ID NO: 36 according to Chothia numbering. In some embodiments, an antibody agent (e.g., a PGDM1400 antibody agent) comprises HCDR1, HCDR2, and HCDR3 amino acid sequences of the heavy chain variable domain represented by amino acid sequence SEQ ID NO: 36 according to IMGT numbering. In some embodiments, an antibody agent (e.g., a PGDM1400 antibody agent) comprises HCDR1, HCDR2, and HCDR3 amino acid sequences of the heavy chain variable domain represented by amino acid sequence SEQ ID NO: 36 according to AbM numbering.

[0426] In some embodiments, an antibody agent (e.g., a PGDM1400 antibody agent) comprises LCDR1, LCDR2, and LCDR3 amino acid sequences of of the light chain variable domain represented by amino acid sequence SEQ ID NO: 43 according to Kabat numbering. In some embodiments, an antibody agent (e.g., a PGDM1400 antibody agent) comprises LCDR1, LCDR2, and LCDR3 amino acid sequences of of the light chain variable domain represented by amino acid sequence SEQ ID NO: 43 according to Chothia numbering. In some embodiments, an antibody agent (e.g., a PGDM1400 antibody agent) comprises LCDR1, LCDR2, and LCDR3 amino acid sequences of of the light chain variable domain represented by amino acid sequence SEQ ID NO: 43 according to IMGT numbering. In some embodiments, an antibody agent (e.g., a PGDM1400 antibody agent) comprises LCDR1, LCDR2, and LCDR3 amino acid sequences of of the light chain variable domain represented by amino acid sequence SEQ ID NO: 43 according to AbM numbering.

[0427] In some embodiments, an HCDR1 of an antibody agent (e.g., a PGDM1400 antibody agent) comprises an amino acid sequence as set out in SEQ ID NO: 18, 1484, or 1490.

[0428] In some embodiments, an HCDR2 of an antibody agent (e.g., a PGDM1400 antibody agent) comprises an amino acid sequence as set out in SEQ ID NO: 21, 1485, 1491, or 1492.

[0429] In some embodiments, an HCDR3 of an antibody agent (e.g., a PGDM1400 antibody agent) comprises an amino acid sequence as set out in SEQ ID NO: 24, 1486, or 1493.

[0430] In some embodiments, an LCDR1 of an antibody agent (e.g., a PGDM1400 antibody agent) comprises an amino acid sequence as set out in SEQ ID NO: 27 or 1487.

[0431] In some embodiments, an LCDR2 of an antibody agent (e.g., a PGDM1400 antibody agent) comprises an amino acid sequence as set out in SEQ ID NO: 30 or 1488.

[0432] In some embodiments, an LCDR3 of an antibody agent (e.g., a PGDM1400 antibody agent) comprises an amino acid sequence as set out in SEQ ID NO: 33 or 1489.

[0433] In some embodiments, an antibody agent (e.g., a PGDM1400 antibody agent) comprises one or more CDRs or any set of CDRs as shown in Table 2 below.

TABLE 2
Exemplary PGDM1400 Antibody Agent CDR Sequences

| | | |
|---|---|---|
| SEQ ID | | |
| NO | Description | Sequence |

Exemplary PGDM1400-1

| | | | |
|---|---|---|---|
| 18 | PGDM1400 HCDR1 | AA | GNTLKTYD |
| 21 | PGDM1400 HCDR2 | AA | ISHEGDKK |
| 24 | PGDM1400 HCDR3 | AA | CAKGSKHRLRDYALYDDDGALNWAVDVDYLSNLEFW |
| 27 | PGDM1400 LCDR1 | AA | HSLIHGDRNNY |
| 30 | PGDM1400 LCDR2 | AA | LAS |
| 33 | PGDM1400 LCDR3 | AA | CMQGRESPWTF |

Exemplary PGDM1400-2

| | | | |
|---|---|---|---|
| 1484 | PGDM1400 HCDR1 | AA | TYDLH |
| 1485 | PGDM1400 HCDR2 | AA | WISHEGDK |
| 1486 | PGDM1400 HCDR3 | AA | GSKHRLRDYALYDDDGALNWAVDVDYLSNLEF |
| 1487 | PGDM1400 LCDR1 | AA | KSSHSLIHGDRNNYLA |
| 1488 | PGDM1400 LCDR2 | AA | LASSRAS |
| 1489 | PGDM1400 LCDR3 | AA | MQGRESPWT |

Exemplary PGDM1400-3

| | | | |
|---|---|---|---|
| 1490 | PGDM1400 HCDR1 | AA | GNTLKTY |
| 1491 | PGDM1400 HCDR2 | AA | SHEGDK |
| 1486 | PGDM1400 HCDR3 | AA | GSKHRLRDYALYDDDGALNWAVDVDYLSNLEF |
| 1487 | PGDM1400 LCDR1 | AA | KSSHSLIHGDRNNYLA |
| 1488 | PGDM1400 LCDR2 | AA | LASSRAS |
| 1489 | PGDM1400 LCDR3 | AA | MQGRESPWT |

Exemplary PGDM1400-4

| | | | |
|---|---|---|---|
| 1484 | PGDM1400 HCDR1 | AA | TYDLH |
| 1492 | PGDM1400 HCDR2 | AA | WISHEGDKKVIVERFKA |
| 1486 | PGDM1400 HCDR3 | AA | GSKHRLRDYALYDDDGALNWAVDVDYLSNLEF |
| 1487 | PGDM1400 LCDR1 | AA | KSSHSLIHGDRNNYLA |
| 1488 | PGDM1400 LCDR2 | AA | LASSRAS |
| 1489 | PGDM1400 LCDR3 | AA | MQGRESPWT |

Exemplary PGDM1400-5

| | | | |
|---|---|---|---|
| 1490 | PGDM1400 HCDR1 | AA | GNTLKTY |
| 1491 | PGDM1400 HCDR2 | AA | SHEGDK |
| 1486 | PGDM1400 HCDR3 | AA | GSKHRLRDYALYDDDGALNWAVDVDYLSNLEF |
| 1487 | PGDM1400 LCDR1 | AA | KSSHSLIHGDRNNYLA |
| 1488 | PGDM1400 LCDR2 | AA | LASSRAS |
| 1489 | PGDM1400 LCDR3 | AA | MQGRESPWT |

Exemplary PGDM1400-6

| | | | |
|---|---|---|---|
| 18 | PGDM1400 HCDR1 | AA | GNTLKTYD |
| 21 | PGDM1400 HCDR2 | AA | ISHEGDKK |
| 1493 | PGDM1400 HCDR3 | AA | AKGSKHRLRDYALYDDDGALNWAVDVDYLSNLEF |
| 27 | PGDM1400 LCDR1 | AA | HSLIHGDRNNY |
| 30 | PGDM1400 LCDR2 | AA | LAS |
| 1489 | PGDM1400 LCDR3 | AA | MQGRESPWT |

[0434] In some embodiments, an antibody agent (e.g., a PGDM1400 antibody agent) comprises HCDR1, HCDR2, and HCDR3 amino acid sequences as set out in SEQ ID NOs: 1484, 1492, and 1486, respectively. In some embodiments, an antibody agent (e.g., a PGDM1400 antibody agent) comprises HCDR1, HCDR2, and HCDR3 amino acid sequences as set out in SEQ ID NOs: 1490, 1491, and 1486, respectively. In some embodiments, an antibody agent (e.g., a PGDM1400 antibody agent) comprises HCDR1, HCDR2, and HCDR3 amino acid sequences as set out in SEQ ID NOs: 18, 21, and 1493, respectively.

[0435] In some embodiments, an antibody agent (e.g., a PGDM1400 antibody agent) comprises HCDR1, HCDR2, HCDR3 amino acid sequences as set out in SEQ ID NOs: 18, 21, and 24, respectively. In some embodiments, an antibody agent (e.g., a PGDM1400 antibody agent) comprises HCDR1, HCDR2, and HCDR3 amino acid sequences as set out in SEQ ID NOs: 1484, 1485, and 1486, respectively.

[0436] In some embodiments, an antibody agent (e.g., a PGDM1400 antibody agent) comprises LCDR1, LCDR2, and LCDR3 amino acid sequences as set out in SEQ ID NOs: 1487, 1488, and 1489, respectively. In some embodiments, an antibody agent (e.g., a PGDM1400 antibody agent) comprises LCDR1, LCDR2, and LCDR3 amino acid sequences as set out in SEQ ID NOs: 27, 30 and 1489, respectively.

[0437] In some embodiments, an antibody agent (e.g., a PGDM1400 antibody agent) comprises LCDR1, LCDR2, LCDR3 amino acid sequences as set out in SEQ ID NOs: 27, 30, and 33, respectively.

[0438] In some embodiments, an antibody agent (e.g., a PGDM1400 antibody agent) comprises (i) HCDR1, HCDR2, and HCDR3 amino acid sequences as set out in SEQ ID NOs: 18, 21, and 24, respectively; and (ii) LCDR1, LCDR2, and LCDR3 amino acid sequences as set out SEQ ID NOs: 27, 30, and 33, respectively.

[0439] In some embodiments, an antibody agent (e.g., a PGDM1400 antibody agent) comprises (i) HCDR1, HCDR2, and HCDR3 amino acid sequences as set out in SEQ ID NOs: 1484, 1485, and 1486, respectively; and (ii) LCDR1, LCDR2, and LCDR3 amino acid sequences as set out SEQ ID NOs: 1487, 1488, and 1489, respectively.

[0440] In some embodiments, an antibody agent (e.g., a PGDM1400 antibody agent) comprises (i) HCDR1, HCDR2, and HCDR3 amino acid sequences as set out in SEQ ID NOs: 1490, 1491, and 1486, respectively; and (ii) LCDR1, LCDR2, and LCDR3 amino acid sequences as set out SEQ ID NOs: 1487, 1488, and 1489, respectively.

[0441] In some embodiments, an antibody agent (e.g., a PGDM1400 antibody agent) comprises (i) HCDR1, HCDR2, and HCDR3 amino acid sequences as set out in SEQ ID NOs: 1484, 1492, and 1486, respectively; and (ii) LCDR1, LCDR2, and LCDR3 amino acid sequences as set out SEQ ID NOs: 1487, 1488, and 1489, respectively.

[0442] In some embodiments, an antibody agent (e.g., a PGDM1400 antibody agent) comprises (i) HCDR1, HCDR2, and HCDR3 amino acid sequences as set out in SEQ ID NOs: 1490, 1491, and 1486, respectively; and (ii) LCDR1, LCDR2, and LCDR3 amino acid sequences as set out SEQ ID NOs: 1487, 1488, and 1489, respectively.

[0443] In some embodiments, an antibody agent (e.g., a PGDM1400 antibody agent) comprises (i) HCDR1, HCDR2, and HCDR3 amino acid sequences as set out in SEQ ID NOs: 18, 21, and 1493, respectively; and (ii) LCDR1, LCDR2, and LCDR3 amino acid sequences as set out SEQ ID NOs: 27, 30, and 1489, respectively.

[0444] In some embodiments, a PGDM1400 antibody agent comprises a FR1, FR2, FR3, and/or a FR4 domain of the heavy chain variable domain represented by amino acid sequence SEQ ID NO: 36. In some embodiments, an PGDM1400 antibody agent comprises a FR1, FR2, FR3, and/or a FR4 domain of the light chain variable domain represented by amino acid sequence SEQ ID NO: 43.

[0445] In some embodiments, an antibody agent (e.g., a PGDM1400 antibody agent) comprises a heavy chain FR1 comprising amino acid sequence as shown in SEQ ID NO: 1496. In some embodiments, an antibody agent (e.g., a PGDM1400 antibody agent) comprises a heavy chain FR2 comprising amino acid sequence as shown in SEQ ID NO: 1497. In some embodiments, an antibody agent (e.g., a PGDM1400 antibody agent) comprises a heavy chain FR3 comprising amino acid sequence as shown in SEQ ID NO: 1498. In some embodiments, an antibody agent (e.g., a PGDM1400 antibody agent) comprises a heavy chain FR4 comprising amino acid sequence as shown in SEQ ID NO: 1499.

[0446] In some embodiments, an antibody agent (e.g., a PGDM1400 antibody agent) comprises a light chain FR1 comprising amino acid sequence as shown in SEQ ID NO: 1500. In some embodiments, an antibody agent (e.g., a PGDM1400 antibody agent) comprises a light chain FR2 comprising amino acid sequence as shown in SEQ ID NO: 1501. In some embodiments, an antibody agent (e.g., a PGDM1400 antibody agent) comprises a light chain FR3 comprising amino acid sequence as shown in SEQ ID NO: 1502. In some embodiments, an antibody agent (e.g., a PGDM1400 antibody agent) comprises a light chain FR4 comprising amino acid sequence as shown in SEQ ID NO: 1503.

[0447] In some embodiments, an antibody agent (e.g., a PGDM1400 antibody agent) heavy chain FR1, FR2, FR3, and/or a FR4 domains comprise amino acid sequences as set out in SEQ ID NOs: 1496, 1497, 1498, and 1499 respectively. In some embodiments, an antibody agent (e.g., a PGDM1400 antibody agent) light chain FR1, FR2, FR3, and/or a FR4 domains comprise amino acid sequences as set out in SEQ ID NOs: 1500, 1501, 1502, and 1503 respectively.

[0448] In some embodiments, an antibody agent (e.g., a PGDM1400 antibody agent) comprises a VH domain that comprises HCDR1, FR1, HCDR2, and HCDR3 amino acid sequences as set out in SEQ ID NOs: 18, 1496, 21, and 24, respectively.

[0449] In some embodiments, an antibody agent (e.g., a PGDM1400 antibody agent) comprises (i) a VH domain that comprises HCDR1, FR1, HCDR2, and HCDR3 amino acid sequences as set out in SEQ ID NOs: 18, 1496, 21, and 24, respectively; and (ii) a VL domain that comprises LCDR1, LCDR2, and LCDR3 amino acid sequences as set out SEQ ID NOs: 27, 30, and 33, respectively.

[0450] In some embodiments, an antibody agent encoded by one or more polyribonucleotides provided herein includes all or part of a PGDM1400 antibody. In some embodiments, an antibody agent comprises a heavy chain variable domain comprising: (i) HCDR1 (SEQ ID NO: 18); (ii) HCDR2 (SEQ ID NO: 21); (iii) HCDR3 (SEQ ID NO: 24); or (iv) a combination thereof. In some embodiments, an antibody agent comprises a heavy chain variable domain comprising: (i) HCDR1 (SEQ ID NO: 18); (ii) HCDR2 (SEQ ID NO: 21); and (iii) HCDR3 (SEQ ID NO: 24). In some embodiments, an antibody agent comprises a light chain variable domain comprising: (i) LCDR1 (SEQ ID NO: 27); (ii) LCDR2 (LAS; SEQ ID NO: 30); (iii) LCDR3 (SEQ ID NO: 33); or (iv) a combination thereof. In some embodiments, an antibody agent comprises a light chain variable domain comprising: (i) LCDR1 (SEQ ID NO: 27); (ii) LCDR2 (LAS; SEQ ID NO: 30); and (iii) LCDR3 (SEQ ID NO: 33). In some embodiments, an antibody agent comprises (a) a heavy chain variable domain comprising: (i) HCDR1 (SEQ ID NO: 18); (ii) HCDR2 (SEQ ID NO: 21); (iii) HCDR3 (SEQ ID NO: 24); or (iv) a combination thereof; and (b) a light chain variable domain comprising: (i) LCDR1 (SEQ ID NO: 27); (ii) LCDR2 (LAS; SEQ ID NO: 30); (iii) LCDR3 (SEQ ID NO: 33); or (iv) a combination thereof. In some embodiments, an antibody agent comprises (a) a heavy chain variable domain comprising: (i) HCDR1 (SEQ ID NO: 18); (ii) HCDR2 (SEQ ID NO: 21); and (iii) HCDR3 (SEQ ID NO: 24); and (b) a light chain variable domain comprising: (i) LCDR1 (SEQ ID NO: 27); (ii) LCDR2 (LAS; SEQ ID NO: 30); and (iii) LCDR3 (SEQ ID NO: 33).

[0451] In some embodiments, a polyribonucleotide described herein encodes all or part of a PGDM1400 antibody. In some embodiments, a polyribonucleotide described herein encodes an immunoglobulin chain comprising a heavy chain variable domain, wherein the heavy chain variable domain comprises: (i) HCDR1 (SEQ ID NO: 18); (ii) HCDR2 (SEQ ID NO: 21); (iii) HCDR3 (SEQ ID NO: 24); or (iv) a combination thereof. In some embodiments, a polyribonucleotide described herein encodes an immunoglobulin chain comprising a heavy chain variable domain, wherein the heavy chain variable domain comprises: (i) HCDR1 (SEQ ID NO: 18); (ii) HCDR2 (SEQ ID NO: 21); and (iii) HCDR3 (SEQ ID NO: 24). In some embodiments, a polyribonucleotide described herein encodes an immunoglobulin chain comprising a light chain variable domain, wherein the light chain variable domain comprises: (i) LCDR1 (SEQ ID NO: 27); (ii) LCDR2 (LAS; SEQ ID NO: 30); (iii) LCDR3 (SEQ ID NO: 33); or (iv) a combination thereof. In some embodiments, a polyribonucleotide described herein encodes an immunoglobulin chain comprising a light chain variable domain, wherein the light chain variable domain comprises: (i) LCDR1 (SEQ ID NO: 27); (ii) LCDR2 (LAS; SEQ ID NO: 30); and (iii) LCDR3 (SEQ ID NO: 33). In some embodiments, a polyribonucleotide described herein encodes an immunoglobulin chain comprising a heavy chain variable domain and a light chain variable domain, wherein the heavy chain variable domain comprises: (i) HCDR1 (SEQ ID NO: 18); (ii) HCDR2 (SEQ ID NO: 21); (iii) HCDR3 (SEQ ID NO: 24); or (iv) a combination thereof; and the light chain variable domain comprises: (i) LCDR1 (SEQ ID NO: 27); (ii) LCDR2 (LAS; SEQ ID NO: 30); (iii) LCDR3 (SEQ ID NO: 33); or (iv) a combination thereof. In some embodiments, a polyribonucleotide described herein encodes an immunoglobulin chain comprising a heavy chain variable domain and a light chain variable domain, wherein the heavy chain variable domain comprises: (i) HCDR1 (SEQ ID NO: 18); (ii) HCDR2 (SEQ ID NO: 21); and (iii) HCDR3 (SEQ ID NO: 24); and the light chain variable domain comprises: (i) LCDR1 (SEQ ID NO: 27); (ii) LCDR2 (LAS; SEQ ID NO: 30); and (iii) LCDR3 (SEQ ID NO: 33). In some embodiments, a polyribonucleotide described herein encodes two immunoglobulin chains: a first immunoglobulin chain comprising a heavy chain variable domain, wherein the heavy chain variable domain comprises: (i) HCDR1 (SEQ ID NO: 18); (ii) HCDR2 (SEQ ID NO: 21); (iii) HCDR3 (SEQ ID NO: 24); or (iv) a combination thereof; and a second immunoglobulin chain comprising a light chain variable domain, wherein the light chain variable domain comprises: (i) LCDR1 (SEQ ID NO: 27); (ii) LCDR2 (LAS; SEQ ID NO: 30); (iii) LCDR3 (SEQ ID NO: 33); or (iv) a combination thereof. In some embodiments, a polyribonucleotide described herein encodes two immunoglobulin chains: a first immunoglobulin chain comprising a heavy chain variable domain, wherein the heavy chain variable domain comprises: (i) HCDR1 (SEQ ID NO: 18); (ii) HCDR2 (SEQ ID NO: 21); and (iii) HCDR3 (SEQ ID NO: 24); and a second immunoglobulin chain comprising a light chain variable domain, wherein the light chain variable domain comprises: (i) LCDR1 (SEQ ID NO: 27); (ii) LCDR2 (LAS; SEQ ID NO: 30); and (iii) LCDR3 (SEQ ID NO: 33).

[0452] In some embodiments, an antibody agent encoded by one or more polyribonucleotides provided herein comprises a heavy chain variable domain having at least 80%, 85%, 90%, 91%, 92%, 93%, 94%, 95%, 96%, 97%, 98%, or 99% sequence identity to an amino acid sequence represented by SEQ ID NO: 36. In some embodiments, an antibody agent encoded by one or more polyribonucleotides provided herein comprises a light chain variable domain having at least 80%, 85%, 90%, 91%, 92%, 93%, 94%, 95%, 96%, 97%, 98%, or 99% identity to an amino acid sequence represented by SEQ ID NO: 43. In some embodiments, an antibody agent comprises a heavy chain variable domain represented by SEQ ID NO: 36. In some embodiments, an antibody agent comprises a light chain variable domain represented by SEQ ID NO: 43.

[0453] In some embodiments, an antibody agent (e.g., a PGDM1400 antibody agent) encoded by one or more polyribonucleotides provided herein comprises a heavy chain variable domain having at least 80%, 85%, 90%, 91%, 92%, 93%, 94%, 95%, 96%, 97%, 98%, or 99% sequence identity to an amino acid sequence represented by SEQ ID NO: 1494. In some embodiments, an antibody agent (e.g., a PGDM1400 antibody agent) encoded by one or more polyribonucleotides provided herein comprises a light chain variable domain having at least 80%, 85%, 90%, 91%, 92%, 93%, 94%, 95%, 96%, 97%, 98%, or 99% identity to an amino acid sequence represented by SEQ ID NO: 43. In some embodiments, an antibody agent comprises a heavy chain variable domain represented by SEQ ID NO: 1494. In some embodiments, an antibody agent comprises a light chain variable domain represented by SEQ ID NO: 43.

[0454] In some embodiments, an antibody agent (e.g., a PGDM1400 antibody agent) encoded by one or more polyribonucleotides provided herein comprises a heavy chain variable domain that comprises one or more mutations relative to an amino acid sequence represented by SEQ ID NO: 1494. In some embodiments, substitution mutations are present at residues 3 and/or 5 relative to SEQ ID NO: 1494. In some embodiments, a substitution mutation at residue 3 results in a positively charged amino acid being present at residue 3 relative to SEQ ID NO: 1494. Positively charged amino acids include Lys (K), Arg (R), and His (H). In some embodiments, a substitution mutation at residue 3 relative to SEQ ID NO: 1494 comprises Q3H. In some embodiments, a substitution mutation at residue 5 results in a polar amino acid being present at residue 5 relative to SEQ ID NO: 1494. Polar amino acids include Ser (S), Thr (T), Tyr (Y), Asn (N), and Gln (Q). In some embodiments, a substitution mutation at residue 5 relative to SEQ ID NO: 1494 comprises V5T.

[0455] In some embodiments, an antibody agent (e.g., a PGDM1400 antibody agent) encoded by one or more polyribonucleotides provided herein comprises a heavy chain variable domain that comprises SEQ ID NO: 1494 with substitution mutations Q3H and V5T.

[0456] In some embodiments, a polyribonucleotide described herein encodes an immunoglobulin chain comprising a heavy chain variable domain having at least 80%, 85%, 90%, 91%, 92%, 93%, 94%, 95%, 96%, 97%, 98%, or 99% sequence identity to an amino acid sequence represented by SEQ ID NO: 36. In some embodiments, a polyribonucleotide described herein encodes an immunoglobulin chain comprising a light chain variable domain having at least 80%, 85%, 90%, 91%, 92%, 93%, 94%, 95%, 96%, 97%, 98%, or 99% sequence identity to an amino acid sequence represented by SEQ ID NO: 43. In some embodiments, a polyribonucleotide described herein encodes an immunoglobulin chain comprising a heavy chain variable domain and a light chain variable domain, wherein the heavy chain variable domain has at least 80%, 85%, 90%, 91%, 92%, 93%, 94%, 95%, 96%, 97%, 98%, or 99% sequence identity to an amino acid sequence represented by SEQ ID NO: 36, and wherein the light chain variable domain has at least 80%, 85%, 90%, 91%, 92%, 93%, 94%, 95%, 96%, 97%, 98%, or 99% sequence identity to an amino acid sequence represented by SEQ ID NO: 43.

[0457] In some embodiments, a polyribonucleotide as described herein encodes an immunoglobulin chain of an antibody agent, where the immunoglobulin chain comprises a heavy chain variable (VH) domain. In some embodiments, a VH domain comprises a VH domain of a PGDM1400 antibody. In some embodiments, a polyribonucleotide encodes a VH domain of an antibody selected from: PGT121, 3BNC117, b12, 10-1074, 10-1074-LS, 10E8, VRC01, VRC07-523, or 1-18 (e.g., as described herein).

[0458] In some embodiments, a polyribonucleotide comprises a VH domain encoding sequence that comprises (a) an HCDR1-encoding sequence that comprises a ribonucleic acid sequence according to SEQ ID NO: 19; (b) an HCDR2-encoding sequence that comprises a ribonucleic acid sequence according to SEQ ID NO: 22; (c) an HCDR3-encoding sequence that comprises a ribonucleic acid sequence according to SEQ ID NO: 25, or (d) a combination thereof. In some embodiments, a polyribonucleotide comprises a VH domain encoding sequence that comprises (a) an HCDR1-encoding sequence that comprises a ribonucleic acid sequence according to SEQ ID NO: 19; (b) an HCDR2-encoding sequence that comprises a ribonucleic acid sequence according to SEQ ID NO: 22; and (c) an HCDR3-encoding sequence that comprises a ribonucleic acid sequence according to SEQ ID NO: 25. In some embodiments, a polyribonucleotide encodes a VH domain, and comprises a VH-encoding sequence that is at least 90%, 91%, 92%, 93%, 94%, 95%, 96%, 97%, 98%, or 99% to identical to SEQ ID NO: 37, 39, or 41. In some embodiments, a polyribonucleotide encodes a VH domain, and comprises a VH-encoding sequence according to SEQ ID NO: 37, 39, or 41.

[0459] In some embodiments, a polyribonucleotide as described herein comprises an immunoglobulin chain of an antibody agent, where the immunoglobulin chain comprises a light chain variable (VL) domain. In some embodiments, a VL domain comprises the VL domain of a PGDM1400 antibody. In some embodiments, a polyribonucleotide encodes a VL domain of an antibody selected from: PGT121, 3BNC117, b12, 10-1074, 10-1074-LS, 10E8, VRC01, VRC07-523, or 1-18 (e.g., as described herein).

[0460] In some embodiments, a polyribonucleotide comprises one or more coding regions that encode an immunoglobulin chain of an antibody agent, where the immunoglobulin chain comprises a light chain variable (VL) domain. In some embodiments, a polyribonucleotide comprises a VL domain encoding sequence that comprises (a) an LCDR1-encoding sequence that comprises a ribonucleic acid sequence according to SEQ ID NO: 28; (b) an LCDR2-encoding sequence that comprises a ribonucleic acid sequence according to SEQ ID NO: 31; (c) an LCDR3-encoding sequence that comprises a ribonucleic acid sequence according to SEQ ID NO: 34; or (d) a combination thereof. In some embodiments, a polyribonucleotide comprises a VL domain encoding sequence that comprises (a) an LCDR1-encoding sequence that comprises a ribonucleic acid sequence according to SEQ ID NO: 28; (b) an LCDR2-encoding sequence that comprises a ribonucleic acid sequence according to SEQ ID NO: 31; and (c) an LCDR3-encoding sequence that comprises a ribonucleic acid sequence according to SEQ ID NO: 34. In some embodiments, a polyribonucleotide encodes a VL domain, and comprises a VL-encoding sequence that is at least 90%, 91%, 92%, 93%, 94%, 95%, 96%, 97%, 98%, or 99% identical to SEQ ID NO: 44 or 46. In some embodiments, a polyribonucleotide encodes a VL domain, and comprises a VL-encoding sequence according to SEQ ID NO: 44 or 46.

[0461] In some embodiments, an antibody agent is formed by one, two, three, or four immunoglobulin chains.

[0462] In some embodiments, a polyribonucleotide as described herein encodes a single immunoglobulin chain. In some embodiments, a first polyribonucleotide encodes a first immunoglobulin chain of an antibody agent. In some embodiments, a first polyribonucleotide encodes a first immunoglobulin chain of an antibody agent and a second polyribonucleotide encodes a second immunoglobulin chain of the antibody agent. In some embodiments, a first polyribonucleotide encodes a first immunoglobulin chain of an antibody agent, a second polyribonucleotide encodes a second immunoglobulin chain of the antibody agent, and a third polyribonucleotide encodes a third immunoglobulin chain of the antibody agent. In some embodiments, a first polyribonucleotide encodes a first immunoglobulin chain of an antibody agent, a second polyribonucleotide encodes a second immunoglobulin chain of the antibody agent, a third polyribonucleotide encodes a third immunoglobulin chain of the antibody agent, and a fourth polyribonucleotide encodes a fourth immunoglobulin chain of the antibody agent.

[0463] In some embodiments, a polyribonucleotide as described herein encodes two immunoglobulin chains. In some embodiments, a single polyribonucleotide can include a first coding region that encodes a first immunoglobulin chain of an antibody and a second coding region that encodes a second immunoglobulin chain of the antibody. In some embodiments, the first coding region and the second coding region are separated by an internal ribosome entry sides (IRES), an internal promoter, or a peptide sequence, such as “self-cleaving” 2A or 2A-like sequences (see, e.g., Szymczak et al. Nat Biotechnol 22:589, May 2004; ePub Apr. 4 2004, which is herein incorporated by reference) to yield the first immunoglobulin chain and the second immunoglobulin chain from the single polyribonucleotide.

[0464] Antibody agents encoded by one or more polyribonucleotides described herein may be in various formats described herein. Exemplary types of antibody agents include, but are not limited to, monoclonal antibodies or polyclonal antibodies. In some embodiments, an antibody agent may include one or more sequence elements that are humanized, chimeric, etc., as is known in the art. An antibody agent utilized in accordance with the present disclosure, in some embodiments, is in a format selected from, but not limited to, intact IgG, IgA, IgG, IgE or IgM antibodies; bi- or multi-specific antibodies (e.g., Zybodies®, etc.); CrossMabs (e.g., CrossMab^{CH1-CLx}; CrossMab^{CH1-CLcv}; bispecific CrossMab^{CH1-CLx} with knob-in-holes); antibody fragments such as Fab fragments, Fab′ fragments, F(ab′)2 fragments, Fd′ fragments, Fd fragments, and isolated complementarity determining regions (CDRs) or sets thereof; single chain Fvs (scFvs); scFv-Fc fusions; polypeptide-Fc fusions; single domain antibodies (e.g., shark single domain antibodies such as IgNAR or fragments thereof); cameloid antibodies; masked antibodies (e.g., Probodies®); Small Modular ImmunoPharmaceuticals (“SMIPs™”); single chain or Tandem diabodies (TandAb®); VHHs; Anticalins®; Nanobodies® minibodies; BiTE®s; ankyrin repeat proteins or DARPINs®; Avimers®; DARTs; TCR-like antibodies; Adnectins®; Affilins®; Trans-bodies®; Affibodies®; TrimerX®; MicroProteins; Fynomers®, Centyrins®; and KALBITOR®s. In some embodiments, immunoglobulin chains and/or fragments of such antibodies may be used in combination, e.g., a scFv-Fc arm with a conventional antibody arm.

[0465] Exemplary formats that may be used in accordance with the present disclosure are described further below.

### A. Conventional Antibody

[0466] In some embodiments, polyribonucleotides described herein can be used to express a conventional antibody. As used herein, a “conventional antibody” refers to an antibody agent that includes two heavy chains and two light chains (see e.g., FIG. 5, Panel A). Each heavy chain includes a heavy chain variable domain operably linked to one or more heavy chain constant domains. In some embodiments, one or more heavy chain constant domains comprise a CH1 domain, a hinge domain, a CH₂ domain, a CH₃ domain, or a combination thereof. In some instances, one or more heavy chain constant domains comprise a CH1 domain, a hinge domain, a CH₂ domain, a CH₃ domain, a CH₄ domain, or a combination thereof. Each light chain includes a light chain variable domain operably linked to a light chain constant domain.

[0467] Typically, a heavy chain variable domain and a light chain variable domain can be further subdivided into regions of variability, termed complementarity determining regions (CDRs), interspersed with regions that are more conserved, termed framework regions (FR). Such heavy chain variable domains and light chain variable domains can each include, e.g., three CDRs and four framework regions, arranged from amino-terminus to carboxyl-terminus in the following order: FR1, CDR1, FR2, CDR2, FR3, CDR3, FR4, one or more of which can be engineered as described herein. The CDRs in a heavy chain are designated “HCDR1”, “HCDR2”, and “HCDR3”, respectively, and the CDRs in a light chain are designated “LCDR1”, “LCDR2”, and “LCDR3”.

[0468] A conventional antibody as described herein may comprise any one of the five major classes of antibodies: IgA, IgD, IgE, IgG, and IgM. In some embodiments, a conventional antibody comprises an IgG or IgA antibody. In some embodiments, a conventional antibody described herein comprises a particular isotype selected from the group of IgA and IgG isotypes: IgG1, IgG2, IgG3, IgG4, IgA1, and IgA2. Additionally, in some embodiments, a conventional antibody may include any particular heavy chain constant domains that correspond to the different classes of immunoglobulins, which include a, b, E, y, and p, respectively. In some embodiments, a conventional antibody is an intact IgG1 antibody or other antibody class or isotype as described herein. (see, e.g., Hudson et al., Nat. Med., 9:129-134 (2003); Pluckthun, The Pharmacology of Monoclonal Antibodies, vol. 113, pp. 269-315 (1994); Hollinger et al., Proc. Natl. Acad. Sci. USA, 90: 6444-6448 (1993); WO93/01161; and U.S. Pat. Nos. 5,571,894, 5,869,046, 6,248,516, and 5,587,458, each of which are herein incorporated by reference). In addition to the various isotypes, allelic variation is present among the IgG subclasses, giving rise to allotypic variants or allotypes. An IgG antibody agent as described herein may comprises a particular allotype, including but not limited to G1m3, G1m17, G1m17,1 or G1m17,1,2 or G1m3,1 (see Vidarsson et al., Front. Immunol, 5(520): 1-17, 2014, which is incorporated herein by reference in its entirety).

[0469] The Fc region of conventional antibodies binds to elements of the complement system, and also to receptors on effector cells, including for example effector cells that mediate cytotoxicity. As is known in the art, affinity and/or other binding attributes of Fc regions for Fc receptors can be modulated through glycosylation or other modification. In some embodiments, conventional antibodies produced and/or utilized in accordance with the present invention include glycosylated Fc domains, including Fc domains with modified or engineered such glycosylation. In some embodiments, conventional antibodies are naturally produced (e.g., generated by an organism reacting to an antigen), or produced by recombinant engineering, chemical synthesis, or other artificial system or methodology. In some embodiments, a conventional antibody is polyclonal; in some embodiments, a conventional antibody is monoclonal. In some embodiments, a conventional antibody has constant region sequences that are characteristic of mouse, rabbit, primate, or human antibodies. In some embodiments, a conventional antibody sequence elements are humanized, primatized, chimeric, etc., as is known in the art.

[0470] A conventional antibody as described herein is an antibody having a structure substantially similar to a native antibody structure or having heavy chains that contain an Fc region as defined herein.

[0471] In some embodiments, a conventional antibody encoded by one or more polyribonucleotides provided herein includes all or part of a PGDM1400 antibody. In some embodiments, a conventional antibody comprises a heavy chain variable domain comprising: (i) HCDR1 (SEQ ID NO: 18); (ii) HCDR2 (SEQ ID NO: 21); (iii) HCDR3 (SEQ ID NO: 24); or (iv) a combination thereof. In some embodiments, a conventional antibody comprises a heavy chain variable domain comprising (i) HCDR1 (SEQ ID NO: 18); (ii) HCDR2 (SEQ ID NO: 21); and (iii) HCDR3 (SEQ ID NO: 24). In some embodiments, a conventional antibody comprises a light chain variable domain comprising: (i) LCDR1 (SEQ ID NO: 27); (ii) LCDR2 (LAS; SEQ ID NO: 30); (iii) LCDR3 (SEQ ID NO: 33); or (iv) a combination thereof. In some embodiments, a conventional antibody comprises a light chain variable domain comprising: (i) LCDR1 (SEQ ID NO: 27); (ii) LCDR2 (LAS; SEQ ID NO: 30); and (iii) LCDR3 (SEQ ID NO: 33). In some embodiments, a conventional antibody comprises (a) a heavy chain variable domain comprising: (i) HCDR1 (SEQ ID NO: 18); (ii) HCDR2 (SEQ ID NO: 21); (iii) HCDR3 (SEQ ID NO: 24); or (iv) a combination thereof; and (b) a light chain variable domain comprising: ((i) LCDR1 (SEQ ID NO: 27); (ii) LCDR2 (LAS; SEQ ID NO: 30); (iii) LCDR3 (SEQ ID NO: 33); or (iv) a combination thereof. In some embodiments, a conventional antibody comprises (a) a heavy chain variable domain comprising: (i) HCDR1 (SEQ ID NO: 18); (ii) HCDR2 (SEQ ID NO: 21); and (iii) HCDR3 (SEQ ID NO: 24); and (b) a light chain variable domain comprising: (i) LCDR1 (SEQ ID NO: 27); (ii) LCDR2 (LAS; SEQ ID NO: 30); and (iii) LCDR3 (SEQ ID NO: 33).

[0472] In some embodiments, a polyribonucleotide described herein encodes an immunoglobulin chain of a conventional antibody, wherein the immunoglobulin chain comprises a heavy chain variable domain, and wherein the heavy chain variable domain comprises: (i) HCDR1 (SEQ ID NO: 18); (ii) HCDR2 (SEQ ID NO: 21); (iii) HCDR3 (SEQ ID NO: 24); or (iv) a combination thereof. In some embodiments, a polyribonucleotide described herein encodes an immunoglobulin chain of a conventional antibody, wherein the immunoglobulin chain comprises a heavy chain variable domain, and wherein the heavy chain variable domain comprises: (i) HCDR1 (SEQ ID NO: 18); (ii) HCDR2 (SEQ ID NO: 21); and (iii) HCDR3 (SEQ ID NO: 24). In some embodiments, a polyribonucleotide described herein encodes an immunoglobulin chain of a conventional antibody, wherein the immunoglobulin chain comprises a light chain variable domain, and wherein the light chain variable domain comprises: (i) LCDR1 (SEQ ID NO: 27); (ii) LCDR2 (LAS; SEQ ID NO: 30); (iii) LCDR3 (SEQ ID NO: 33); or (iv) a combination thereof. In some embodiments, a polyribonucleotide described herein encodes an immunoglobulin chain of a conventional antibody, wherein the immunoglobulin chain comprises a light chain variable domain, and wherein the light chain variable domain comprises: (i) LCDR1 (SEQ ID NO: 27); (ii) LCDR2 (LAS; SEQ ID NO: 30); and (iii) LCDR3 (SEQ ID NO: 33). In some embodiments, a polyribonucleotide described herein encodes two immunoglobulin chains of a conventional antibody: a first immunoglobulin chain comprising a heavy chain variable domain, wherein the heavy chain variable domain comprises: (i) HCDR1 (SEQ ID NO: 18); (ii) HCDR2 (SEQ ID NO: 21); (iii) HCDR3 (SEQ ID NO: 24); or (iv) a combination thereof; and a second immunoglobulin chain comprising a light chain variable domain, wherein the light chain variable domain comprises: (i) LCDR1 (SEQ ID NO: 27); (ii) LCDR2 (LAS; SEQ ID NO: 30); (iii) LCDR3 (SEQ ID NO: 33); or (iv) a combination thereof. In some embodiments, a polyribonucleotide described herein encodes two immunoglobulin chains of a conventional antibody: a first immunoglobulin chain comprising a heavy chain variable domain, wherein the heavy chain variable domain comprises: (i) HCDR1 (SEQ ID NO: 18); (ii) HCDR2 (SEQ ID NO: 21); and (iii) HCDR3 (SEQ ID NO: 24); and a second immunoglobulin chain comprising a light chain variable domain, wherein the light chain variable domain comprises: (i) LCDR1 (SEQ ID NO: 27); (ii) LCDR2 (LAS; SEQ ID NO: 30); and (iii) LCDR3 (SEQ ID NO: 33).

[0473] In some embodiments, a conventional antibody encoded by one or more polyribonucleotides provided herein comprises a heavy chain variable domain having at least 80%, 85%, 90%, 91%, 92%, 93%, 94%, 95%, 96%, 97%, 98%, or 99% sequence identity to an amino acid sequence represented by SEQ ID NO: 36. In some embodiments, a conventional antibody encoded by one or more polyribonucleotides provided herein comprises a light chain variable domain having at least 80%, 85%, 90%, 91%, 92%, 93%, 94%, 95%, 96%, 97%, 98%, or 99% identity to an amino acid sequence represented by SEQ ID NO: 43. In some embodiments, a conventional antibody comprises a heavy chain variable domain represented by SEQ ID NO: 36. In some embodiments, conventional antibody comprises a light chain variable domain represented by SEQ ID NO: 43.

[0474] In some embodiments, a conventional antibody encoded by one or more polyribonucleotides provided herein comprises a heavy chain variable domain having at least 80%, 85%, 90%, 91%, 92%, 93%, 94%, 95%, 96%, 97%, 98%, or 99% sequence identity to an amino acid sequence represented by SEQ ID NO: 1494. In some embodiments, a conventional antibody encoded by one or more polyribonucleotides provided herein comprises a light chain variable domain having at least 80%, 85%, 90%, 91%, 92%, 93%, 94%, 95%, 96%, 97%, 98%, or 99% identity to an amino acid sequence represented by SEQ ID NO: 43. In some embodiments, a conventional antibody comprises a heavy chain variable domain represented by SEQ ID NO: 1494. In some embodiments, conventional antibody comprises a light chain variable domain represented by SEQ ID NO: 43.

[0475] In some embodiments, an antibody agent (e.g., a PGDM1400 antibody agent) encoded by one or more polyribonucleotides provided herein comprises a heavy chain variable domain that comprises one or more mutations relative to an amino acid sequence represented by SEQ ID NO: 1494. In some embodiments, substitution mutations are present at residues 3 and/or 5 relative to SEQ ID NO: 1494. In some embodiments, a substitution mutation at residue 3 results in a positively charged amino acid being present at residue 3 relative to SEQ ID NO: 1494. Positively charged amino acids include Lys (K), Arg (R), and His (H). In some embodiments, a substitution mutation at residue 3 relative to SEQ ID NO: 1494 comprises Q3H. In some embodiments, a substitution mutation at residue 5 results in a polar amino acid being present at residue 5 relative to SEQ ID NO: 1494. Polar amino acids include Ser (S), Thr (T), Tyr (Y), Asn (N), and Gln (Q). In some embodiments, a substitution mutation at residue 5 relative to SEQ ID NO: 1494 comprises V5T.

[0476] In some embodiments, an antibody agent (e.g., a PGDM1400 antibody agent) encoded by one or more polyribonucleotides provided herein comprises a heavy chain variable domain that comprises SEQ ID NO: 1494 with substitution mutations Q3H and V5T.

[0477] In some embodiments, a polyribonucleotide described herein encodes an immunoglobulin chain of a conventional antibody, wherein the immunoglobulin chain comprises a heavy chain variable domain having at least 80%, 85%, 90%, 91%, 92%, 93%, 94%, 95%, 96%, 97%, 98%, or 99% sequence identity to an amino acid sequence represented by SEQ ID NO: 36. In some embodiments, a polyribonucleotide described herein encodes an immunoglobulin chain of a conventional antibody, wherein the immunoglobulin chain comprises a light chain variable domain having at least 80%, 85%, 90%, 91%, 92%, 93%, 94%, 95%, 96%, 97%, 98%, or 99% sequence identity to an amino acid sequence represented by SEQ ID NO: 43.

[0478] Conventional antibodies encoded by one or more polyribonucleotides as described herein may comprise one or more heavy chain constant domains. In some embodiments, one or more heavy chain constant domains comprise a CH₃ domain. In some embodiments, a conventional antibody encoded by one or more polyribonucleotides as described herein comprises a CH₃ domain that comprises a G1m3, G1m17, or a G1m17,1 allotype. In some embodiments, a conventional antibody encoded by one or more polyribonucleotides as described herein comprises a CH₃ domain having an amino acid sequence at least 90%, 91%, 92%, 93%, 94%, 95%, 96%, 97%, 98%, or 99% identical to a sequence represented in any one of SEQ ID NOs: 113, 116, 119, 122, 125, 128, 131, 134, 137, 140, 143, 146, or 1495. In some embodiments, a conventional antibody encoded by one or more polyribonucleotides as described herein comprises a CH₃ domain having an amino acid sequence represented in any one of SEQ ID NOs: 113, 116, 119, 122, 125, 128, 131, 134, 137, 140, 143, 146, or 1495. In some embodiments, a CH₃ domain comprises amino acid sequence SEQ ID NO: 1495 with substitution mutations D16E and L18M.

[0479] Conventional antibodies encoded by one or more polyribonucleotides as described herein may comprise one or more heavy chain constant domains comprising an amino acid modification (e.g., a substitution or deletion) at one or more amino acid positions. For example, a conventional antibody encoded by one or more polyribonucleotides as described herein may include an L/S mutation within a CH₃ region (for enhanced FcRn binding) (see Zalevsky J et al. Nat Biotechnol. 2010, which is herein incorporated by reference). Such mutations are noted as M428L and N434S according to EU numbering (i.e., M88L and N94S within the CH₃ domain, e.g., SEQ ID NO: 113, 116, or 1495), and referred to herein as “LS” or “L/S” (see e.g., FIG. 5, Panel D). In some embodiments, a conventional antibody encoded by one or more polyribonucleotides as described herein comprises an E294 deletion (for Fc hypersialylation) (see Bas M et al. J Immunol 2019, which is herein incorporated by reference.

[0480] The present disclosure also provides technologies that can be used to express an antibody agent, e.g., as illustrated in FIG. 3 or described in Stadler et al. (2016) Oncoimmunology 5(3): e1091555; and/or in Stadler et al. (2017) Nature Medicine 23(7): 815-817. Challenges exist in producing multiple antibody agents from a single composition (e.g., a composition comprising polyribonucleotides sufficient to encode multiple antibody agents), particularly because the random pairing of different antibody heavy and light chains can yield undesired antibody species. Due to the presence of mispaired byproducts, and significantly reduced production yields, sophisticated purification procedures are required to isolate the desired antibody agent in those situations (see e.g., Morrison, S. L., Nature Biotech. 25, 1233-1234, 2007, which is herein incorporated by reference). In general, the same problem of mispaired byproducts remains if recombinant expression techniques are used. One approach to solve the problem of mispaired byproducts is known as “knob-into-holes technology” (KIH), which aims to force the pairing of two different antibody heavy chains by introducing mutations into the CH₃ domains to modify the contact interface. On one chain bulky amino acids were replaced by amino acids with short side chains to create a “hole” and amino acids with large side chains were introduced into the other CH₃ domain, to create a “knob”. By co-expressing these two heavy chains with two light chains, high yields of heterodimer formation versus homodimer was observed (see Ridgway, J. B., et al, Protein Eng. 9, 617-621, 1996; and WO 96/027011, which are herein incorporated by reference). In some embodiments, antibody agents described herein utilize KIH technology as described in, e.g., WO 1998/050431, which is herein incorporated by reference in its entirety. As described herein, an antibody agent may comprise certain mutations that utilize KIH technology that include, but are not limited to, a CH₃ modification. In some embodiments, an antibody agent comprises a CH₃ domain comprising one or more of the following mutations: Y349C, T366S, L368A, and Y407V (according to EU numbering). In some embodiments, an antibody agent comprises a CH₃ domain, wherein the CH₃ domain comprises each of the following mutations: Y349C, T366S, L368A, and Y407V (according to EU numbering). Such a combination of mutations is referred to herein as “cah”. In some embodiments, an antibody agent comprises a CH₃ domain comprising one or more mutations selected from: S354C and T366W (according to EU numbering). In some embodiments, an antibody agent comprises a CH₃ domain comprising each of the following mutations: S354C and T366W (according to EU numbering). Such a combination of CH₃ mutations is referred to herein as “cak”.

[0481] Accordingly, in some embodiments, a conventional antibody encoded by one or more polyribonucleotides as described herein comprises a CH₃ domain comprising one or more of the following mutations: Y349C, T366S, L368A, and Y407V (according to EU numbering). In some embodiments, a conventional antibody encoded by one or more polyribonucleotides as described herein comprises a CH₃ domain comprising one or more mutations selected from: S354C and T366W (according to EU numbering).

[0482] In some embodiments, a polyribonucleotide encodes a CH₃ domain that comprises one of the following substitution mutations: M428L, N434S, or a combination thereof (e.g., an “L/S” mutation). In some embodiments, a polyribonucleotide comprises a CH₃ ribonucleic acid sequence that comprises any one of SEQ ID NOs: 117 and 135. In some embodiments, a polyribonucleotide encodes a CH₃ domain that comprises one or more of the following substitution mutations: Y349C, T366S, L368A, and Y407V (according to EU numbering). In some embodiments, a polyribonucleotide comprises a ribonucleic acid sequence according to SEQ ID NO: 120 and 138. In some embodiments, a polyribonucleotide encodes a CH₃ domain that comprises one or both of the following substitution mutations: S354C and T366W (according to EU numbering). In some embodiments, a polyribonucleotide comprises a ribonucleic acid sequence according to SEQ ID NO: 126 and 144.

[0483] In some embodiments, a polyribonucleotide encodes an immunoglobulin chain that comprises a VH domain operably linked to one or more constant domains, where the one or more constant domains comprise a CH₃ domain. In some embodiments, a polyribonucleotide comprises a ribonucleic acid sequence according to SEQ ID NO: 114. In some embodiments, polyribonucleotide comprises a CH₃ ribonucleic acid sequence that encodes the CH₃ domain that comprises a G1m3, G1m17, or a G1m17,1 allotype. In some embodiments, a polyribonucleotide comprises a CH₃ ribonucleic acid sequence that comprises any one of SEQ ID NOs: 114 and 132.

[0484] In some embodiments, a conventional antibody encoded by one or more polyribonucleotides as described herein comprises a CH₁ domain. In some embodiments, a conventional antibody encoded by one or more polyribonucleotides as described herein comprises a CH₁ domain that comprises a G1m3 allotype. In some embodiments, a conventional antibody encoded by one or more polyribonucleotides as described herein comprises a CH₁ domain that comprises a G1m17 allotype. In some embodiments, a conventional antibody encoded by one or more polyribonucleotides as described herein comprises a CH₁ domain that comprises an amino acid sequence represented in SEQ ID NO: 76 or 81.

[0485] In some embodiments, a polyribonucleotide encodes an immunoglobulin chain that comprises a VH domain operably linked to one or more constant domains, where the one or more constant domains comprise a CH₁ domain. In some embodiments, a polyribonucleotide comprises a CH₁ ribonucleic acid sequence according to SEQ ID NO: 77 or 79. In some embodiments, a polyribonucleotide encodes a CH₁ domain that comprises a G1m3 allotype. In some embodiments, a polyribonucleotide encodes a CH₁ domain that comprises a G1m17 allotype. In some embodiments, a polyribonucleotide encodes a CH₁ ribonucleic acid sequence according to SEQ ID NO: 77, 79, or 82.

[0486] In some embodiments, a polyribonucleotide encodes a CH₁ domain that comprises one or more mutations. In some embodiments, a polyribonucleotide encodes a CH₁ domain that comprises the addition of one or more serine residues. In some embodiments, a polyribonucleotide encodes a CH₁ domain that comprises addition of two additional serine residues (referred to herein as “SS”). In some embodiments, a polyribonucleotide encodes a CH₁ ribonucleic acid sequence that is at least 90%, 91%, 92%, 93%, 94%, 95%, 96%, 97%, 98%, or 99% identical to SEQ ID NO: 91 or 94. In some embodiments, a polyribonucleotide encodes a CH₁ ribonucleic acid sequence represented in SEQ ID NO: 91 or 94. In some embodiments, a polyribonucleotide encodes a CH₁ domain that comprises one or more charge variant mutations. In some embodiments, a polyribonucleotide encodes a CH₁ domain comprising one or more substitution mutations selected from: K147E, K213D, or a combination thereof. In some embodiments, a polyribonucleotide encodes a CH₁ ribonucleic acid sequence that has at least 90%, 91%, 92%, 93%, 94%, 95%, 96%, 97%, 98%, or 99% sequence identity to SEQ ID NO: 85 or 88. In some embodiments, a polyribonucleotide encodes a CH₁ ribonucleic acid sequence according to SEQ ID NO: 85 or 88.

[0487] In some embodiments, a conventional antibody encoded by one or more polyribonucleotides as described herein comprises a hinge domain. In some embodiments, a conventional antibody encoded by one or more polyribonucleotides as described herein comprises a hinge domain that comprises an amino acid sequence represented in SEQ ID NO: 161 (herein referred to as “hinge” in Tables 2 and 4).

[0488] In some embodiments, a polyribonucleotide encodes a hinge domain. In some embodiments, a polyribonucleotide encodes a hinge ribonucleic acid sequence that represented in SEQ ID NO: 162. In some embodiments, a polyribonucleotide encodes a hinge domain that comprises an amino acid modification that comprises a deletion of one or more amino acid residues. In some embodiments, a polyribonucleotide encodes a hinge domain an amino acid modification that comprises a deletion of amino acid residues EPKSC in a conventional Ig hinge domain (represented in SEQ ID NO: 161). Such a modification is referred to herein as “Hinge_del” or “ΔEPKSC”. In some embodiments, a polyribonucleotide encodes a hinge ribonucleic acid sequence represented in SEQ ID NO: 168. In some embodiments, a polyribonucleotide encodes a hinge domain that comprises an amino acid modification that comprises a C220S mutation (according to EU numbering). Such a mutated hinge domain is referred to herein as “Hinge_S” or “C/S”. In some embodiments, a polyribonucleotide encodes a hinge ribonucleic acid sequence represented in SEQ ID NO: 165.

[0489] In some embodiments, a conventional antibody encoded by one or more polyribonucleotides as described herein comprises a CH₂ domain. In some embodiments, a conventional antibody encoded by one or more polyribonucleotides as described herein comprises a CH₂ domain having an amino acid sequence at least 90%, 91%, 92%, 93%, 94%, 95%, 96%, 97%, 98%, or 99% identical to represented in SEQ ID NO: 96. In some embodiments, a conventional antibody encoded by one or more polyribonucleotides as described herein comprises a CH₂ domain having an amino acid sequence represented in SEQ ID NO: 96.

[0490] In some embodiments, a conventional antibody encoded by one or more polyribonucleotides as described herein comprises a CH₂ domain having one or more mutations (e.g., with respect to SEQ ID NO: 96). For example, in some embodiments, a conventional antibody encoded by one or more polyribonucleotides as described herein comprises one or more of the following mutations: G236A, A330L, and I332E (according to EU numbering). In some embodiments, a conventional antibody encoded by one or more polyribonucleotides as described herein comprises the following mutations: G236A, A330L, and I332E (according to EU numbering), referred to herein as “GAALIE”. Such mutations in the CH₂ domain have been associated with increased affinity to Fc receptors FcgRIIA and FcgRIII for enhanced antibody effector function.

[0491] In some embodiments, a conventional antibody encoded by one or more polyribonucleotides as described herein comprises a CH₂ domain having an amino acid sequence that is at least 90%, 91%, 92%, 93%, 94%, 95%, 96%, 97%, 98%, or 99% identical to SEQ ID NO: 99 or 102. In some embodiments, a conventional antibody encoded by one or more polyribonucleotides as described herein comprises a CH₂ domain having an amino acid sequence represented in SEQ ID NO: 99 or 102.

[0492] In some embodiments, a conventional antibody encoded by one or more polyribonucleotides as described herein comprises one or more mutations selected from: G236A and I332E (according to EU numbering). In some embodiments, a conventional antibody encoded by one or more polyribonucleotides as described herein comprises the mutations selected from: G236A and I332E (according to EU numbering), referred to herein as “GAIE”. In some embodiments, a conventional antibody encoded by one or more polyribonucleotides as described herein comprises a CH₂ domain having an amino acid sequence at least 90%, 91%, 92%, 93%, 94%, 95%, 96%, 97%, 98%, or 99% identical to SEQ ID NO: 104. In some embodiments, a conventional antibody encoded by one or more polyribonucleotides as described herein comprises a CH₂ domain having an amino acid sequence represented in SEQ ID NO: 104.

[0493] In some embodiments, a conventional antibody encoded by one or more polyribonucleotides as described herein comprises a mutation: G236A (according to EU numbering), referred to herein as “GA”. In some embodiments, a conventional antibody encoded by one or more polyribonucleotides as described herein comprises a CH₂ domain having an amino acid sequence at least 90%, 91%, 92%, 93%, 94%, 95%, 96%, 97%, 98%, or 99% identical to SEQ ID NO: 107. In some embodiments, a conventional antibody encoded by one or more polyribonucleotides as described herein comprises a CH₂ domain having an amino acid sequence represented in SEQ ID NO: 107.

[0494] In some embodiments, a conventional antibody encoded by one or more polyribonucleotides as described herein comprises a mutation: I332E (according to EU numbering), referred to herein as “IE”. In some embodiments, a conventional antibody encoded by one or more polyribonucleotides as described herein comprises a CH₂ domain having an amino acid sequence at least 90%, 91%, 92%, 93%, 94%, 95%, 96%, 97%, 98%, or 99% identical to SEQ ID NO: 110. In some embodiments, a conventional antibody encoded by one or more polyribonucleotides as described herein comprises a CH₂ domain having an amino acid sequence represented in SEQ ID NO: 110.

[0495] In some embodiments, a polyribonucleotide encodes an immunoglobulin chain that comprises a VH domain operably linked to one or more constant domains, wherein the one or more constant domains comprise a CH₂ domain. In some embodiments, a polyribonucleotide comprises a ribonucleic acid sequence according to SEQ ID NO: 97. In some embodiments, a CH₂ ribonucleic acid encodes a CH₂ domain with one or more amino acid substitution mutations. For example, in some embodiments, a CH₂ ribonucleic acid sequence encodes one or more of the following mutations: G236A, A330L, and I332E (according to EU numbering), referred to herein as “GAALIE”. Such mutations in the CH₂ domain have been associated with increased affinity to Fc receptors FcgRIIA and FcgRIII for enhanced antibody effector function. In some embodiments, a CH₂ ribonucleic sequence comprises or consists of a sequence according to SEQ ID NO: 100 or 103. In some embodiments, a CH₂ ribonucleic acid sequence encodes the one or more of the following mutation: G236A and I332E (according to EU numbering), referred to herein as “GAIE”. In some embodiments, a CH₂ ribonucleic sequence comprises of a sequence according to SEQ ID NO: 105. In some embodiments, a CH₂ ribonucleic acid sequence encodes the mutation G236A (according to EU numbering), referred to herein as “GA”. In some embodiments, a CH₂ ribonucleic sequence comprises of a sequence according to SEQ ID NO: 108. In some embodiments, a CH₂ ribonucleic acid sequence encodes the mutation: I332E (according to EU numbering), referred to herein as “IE”. In some embodiments, a CH₂ ribonucleic sequence comprises of a sequence according to SEQ ID NO: 111. In some embodiments, a CH₂ ribonucleic acid sequence encodes a CH₂ domain that comprises an E294 deletion (according to EU numbering).

[0496] In some embodiments, a conventional antibody encoded by one or more polyribonucleotides as described herein comprises a signal peptide comprising a human signal peptide. In some embodiments, a conventional antibody encoded by one or more polyribonucleotides as described herein comprises a signal peptide comprising SEQ ID NO: 1.

[0497] In some embodiments, a conventional antibody encoded by one or more polyribonucleotides as described herein comprises a light chain constant domain, where the light chain constant domain comprises a kappa light chain constant domain. In some embodiments, a conventional antibody encoded by one or more polyribonucleotides as described herein comprises a kappa light chain constant domain having an amino acid sequence at least 80, 85, 90%, 91%, 92%, 93%, 94%, 95%, 96%, 97%, 98%, or 99% identical to SEQ ID NO: 149. In some embodiments, a conventional antibody encoded by one or more polyribonucleotides as described herein comprises a kappa light chain constant domain having an amino acid sequence represented in SEQ ID NO: 149. In some embodiments, a conventional antibody encoded by one or more polyribonucleotides as described herein comprises a lambda chain variable domain.

[0498] In some embodiments, a conventional antibody encoded by one or more polyribonucleotides as described herein comprises an immunoglobulin chain (e.g., an immunoglobulin heavy chain) encoded by a nucleic acid sequence that has at least 80%, 85%, 90%, 91%, 92%, 93%, 94%, 95%, 96%, 97%, 98%, or 99% sequence identity to a sequence represented by SEQ ID NOs: 170-265, 1305-1306, 1308-1309, 1314-1315. In some embodiments, a conventional antibody encoded by one or more polyribonucleotides as described herein comprises an immunoglobulin chain (e.g., an immunoglobulin heavy chain) encoded by a nucleic acid sequence represented by any one of SEQ ID NOs: 170-265, 1305-1306, 1308-1309, and 1314-1315. In some embodiments, a conventional antibody encoded by one or more polyribonucleotides as described herein comprises an immunoglobulin chain (e.g., an immunoglobulin light chain) encoded by a nucleic acid sequence that has at least at least 80%, 85%, 90%, 91%, 92%, 93%, 94%, 95%, 96%, 97%, 98%, or 99% sequence identity to SEQ ID NO: 842,843, and 1311-1323. In some embodiments, a conventional antibody encoded by one or more polyribonucleotides as described herein comprises an immunoglobulin chain (e.g., an immunoglobulin light chain) encoded by a nucleic acid sequence represented by SEQ ID NO: 842-843 and 1311-1312.

[0499] In some embodiments, a conventional antibody encoded by one or more polyribonucleotides as described herein comprises an immunoglobulin chain (e.g., an immunoglobulin heavy chain) that comprises an amino acid sequence that has at least 80%, 85%, 90%, 91%, 92%, 93%, 94%, 95%, 96%, 97%, 98%, or 99% sequence identity to a sequence represented by any one of SEQ ID NOs: 1307, 1310, or 1316. In some embodiments, a conventional antibody encoded by one or more polyribonucleotides as described herein comprises an immunoglobulin chain (e.g., an immunoglobulin heavy chain) that comprises an amino acid sequence represented by any one of SEQ ID NOs: 1307, 1310 and 1316.

[0500] In some embodiments, a conventional antibody encoded by one or more polyribonucleotides as described herein comprises an immunoglobulin chain (e.g., an immunoglobulin light chain) that comprises an amino acid sequence that has at least at least 80%, 85%, 90%, 91%, 92%, 93%, 94%, 95%, 96%, 97%, 98%, or 99% sequence identity to SEQ ID NO: 1313. In some embodiments, a conventional antibody encoded by one or more polyribonucleotides as described herein comprises an immunoglobulin chain (e.g., an immunoglobulin light chain) that comprises an amino acid sequence represented by SEQ ID NO: 1313.

[0501] Exemplary immunoglobulin chain (e.g., immunoglobulin heavy chain or light chain) configurations of a conventional antibody, as described herein, are shown in Table 3 below.

TABLE 3
Exemplary Immunoglobulin Chain Configurations

| IgG Format - | | | | | | |
|---|---|---|---|---|---|---|
| Heavy Chain | Allotype | VH | CH1 | Hinge | CH2 | CH3 |
| PGDM1400 VH | G1m3 | PGDM1400 | CH1_G1m3 | Hinge | CH2 | CH3_G1m3/17 |
| G1m3 | | | | | | |
| PGDM1400 VH | G1m3 | PGDM1400 | CH1_G1m3 | Hinge | CH2 | CH3_LS_G1m3/17 |
| G1m3 LS | | | | | | |
| PGDM1400 VH | G1m3 | PGDM1400 | CH1_G1m3 | Hinge | CH2 | CH3_cah_LS_G1m3/17 |
| G1m3 cah LS | | | | | | |
| PGDM1400 VH | G1m3 | PGDM1400 | CH1_G1m3 | Hinge | CH2 | CH3_cak_LS_G1m3/17 |
| G1m3 cak LS | | | | | | |
| PGDM1400 VH | G1m3 | PGDM1400 | CH1_G1m3 | Hinge | CH2_GAALIE | CH3_LS_G1m3/17 |
| G1m3 GAALIE | | | | | | |
| LS | | | | | | |
| PGDM1400 VH | G1m3 | PGDM1400 | CH1_G1m3 | Hinge | CH2_GAIE | CH3_LS_G1m3/17 |
| G1m3 GAIE | | | | | | |
| LS | | | | | | |
| PGDM1400 VH | G1m3 | PGDM1400 | CH1_G1m3 | Hinge | CH2_GA | CH3_LS_G1m3/17 |
| G1m3 GA LS | | | | | | |
| PGDM1400 VH | G1m3 | PGDM1400 | CH1_G1m3 | Hinge | CH2_IE | CH3_LS_G1m3/17 |
| G1m3 IE LS | | | | | | |
| PGDM1400 VH | G1m3 | PGDM1400 | CH1_G1m3 | Hinge | CH2_GAALIE | CH3_cah_LS_G1m3/17 |
| G1m3 GAALIE | | | | | | |
| cah LS | | | | | | |
| PGDM1400 VH | G1m3 | PGDM1400 | CH1_G1m3 | Hinge | CH2_GAIE | CH3_cah_LS_G1m3/17 |
| G1m3 GAIE | | | | | | |
| cah LS | | | | | | |
| PGDM1400 VH | G1m3 | PGDM1400 | CH1_G1m3 | Hinge | CH2_GA | CH3_cah_LS_G1m3/17 |
| G1m3 GA cah | | | | | | |
| LS | | | | | | |
| PGDM1400 VH | G1m3 | PGDM1400 | CH1_G1m3 | Hinge | CH2_IE | CH3_cah_LS_G1m3/17 |
| G1m3 IE cah | | | | | | |
| LS | | | | | | |
| PGDM1400 VH | G1m3 | PGDM1400 | CH1_G1m3 | Hinge | CH2_GAALIE | CH3_cak_LS_G1m3/17 |
| G1m3 GAALIE | | | | | | |
| cak LS | | | | | | |
| PGDM1400 VH | G1m3 | PGDM1400 | CH1_G1m3 | Hinge | CH2_GAIE | CH3_cak_LS_G1m3/17 |
| G1m3 GAIE | | | | | | |
| cak LS | | | | | | |
| PGDM1400 VH | G1m3 | PGDM1400 | CH1_G1m3 | Hinge | CH2_GA | CH3_cak_LS_G1m3/17 |
| G1m3 GA cak | | | | | | |
| LS | | | | | | |
| PGDM1400 VH | G1m3 | PGDM1400 | CH1_G1m3 | Hinge | CH2_IE | CH3_cak_LS_G1m3/17 |
| G1m3 IE cak | | | | | | |
| LS | | | | | | |
| PGDM1400 VH | G1m17 | PGDM1400 | CH1_G1m17 | Hinge | CH2 | CH3_G1m3/17 |
| G1m17 | | | | | | |
| PGDM1400 VH | G1m17 | PGDM1400 | CH1_G1m17 | Hinge | CH2 | CH3_LS_G1m3/17 |
| G1m17 LS | | | | | | |
| PGDM1400 VH | G1m17 | PGDM1400 | CH1_G1m17 | Hinge | CH2 | CH3_cah_LS_G1m3/17 |
| G1m17 cah | | | | | | |
| LS | | | | | | |
| PGDM1400 VH | G1m17 | PGDM1400 | CH1_G1m17 | Hinge | CH2 | CH3_cak_LS_G1m3/17 |
| G1m17 cak | | | | | | |
| LS | | | | | | |
| PGDM1400 VH | G1m17 | PGDM1400 | CH1_G1m17 | Hinge | CH2_GAALIE | CH3_LS_G1m3/17 |
| G1m17 | | | | | | |
| GAALIE LS | | | | | | |
| PGDM1400 VH | G1m17 | PGDM1400 | CH1_G1m17 | Hinge | CH2_GAIE | CH3_LS_G1m3/17 |
| G1m17 GAIE | | | | | | |
| LS | | | | | | |
| PGDM1400 VH | G1m17 | PGDM1400 | CH1_G1m17 | Hinge | CH2_GA | CH3_LS_G1m3/17 |
| G1m17 GA LS | | | | | | |
| PGDM1400 VH | G1m17 | PGDM1400 | CH1_G1m17 | Hinge | CH2_IE | CH3_LS_G1m3/17 |
| G1m17 IE LS | | | | | | |
| PGDM1400 VH | G1m17 | PGDM1400 | CH1_G1m17 | Hinge | CH2_GAALIE | CH3_cah_LS_G1m3/17 |
| G1m17 | | | | | | |
| GAALIE cah LS | | | | | | |
| PGDM1400 VH | G1m17 | PGDM1400 | CH1_G1m17 | Hinge | CH2_GAIE | CH3_cah_LS_G1m3/17 |
| G1m17 GAIE | | | | | | |
| cah LS | | | | | | |
| PGDM1400 VH | G1m17 | PGDM1400 | CH1_G1m17 | Hinge | CH2_GA | CH3_cah_LS_G1m3/17 |
| G1m17 GA | | | | | | |
| cah LS | | | | | | |
| PGDM1400 VH | G1m17 | PGDM1400 | CH1_G1m17 | Hinge | CH2_IE | CH3_cah_LS_G1m3/17 |
| G1m17 IE cah | | | | | | |
| LS | | | | | | |
| PGDM1400 VH | G1m17 | PGDM1400 | CH1_G1m17 | Hinge | CH2_GAALIE | CH3_cak_LS_G1m3/17 |
| G1m17 | | | | | | |
| GAALIE cak LS | | | | | | |
| PGDM1400 VH | G1m17 | PGDM1400 | CH1_G1m17 | Hinge | CH2_GAIE | CH3_cak_LS_G1m3/17 |
| G1m17 GAIE | | | | | | |
| cak LS | | | | | | |
| PGDM1400 VH | G1m17 | PGDM1400 | CH1_G1m17 | Hinge | CH2_GA | CH3_cak_LS_G1m3/17 |
| G1m17 GA | | | | | | |
| cak LS | | | | | | |
| PGDM1400 VH | G1m17 | PGDM1400 | CH1_G1m17 | Hinge | CH2_IE | CH3_cak_LS_G1m3/17 |
| G1m17 IE cak | | | | | | |
| LS | | | | | | |
| PGDM1400 VH | G1m17,1 | PGDM1400 | CH1_G1m17 | Hinge | CH2 | CH3_G1m17,1 |
| G1m17,1 | | | | | | |
| PGDM1400 VH | G1m17,1 | PGDM1400 | CH1_G1m17 | Hinge | CH2 | CH3_LS_G1m17,1 |
| G1m17,1 LS | | | | | | |
| PGDM1400 VH | G1m17,1 | PGDM1400 | CH1_G1m17 | Hinge | CH2 | CH3_cah_LS_G1m17,1 |
| G1m17,1 cah | | | | | | |
| LS | | | | | | |
| PGDM1400 VH | G1m17,1 | PGDM1400 | CH1_G1m17 | Hinge | CH2 | CH3_cak_LS_G1m17,1 |
| G1m17,1 cak | | | | | | |
| LS | | | | | | |
| PGDM1400 VH | G1m17,1 | PGDM1400 | CH1_G1m17 | Hinge | CH2_GAALIE | CH3_LS_G1m17,1 |
| G1m17,1 | | | | | | |
| GAALIE LS | | | | | | |
| PGDM1400 VH | G1m17,1 | PGDM1400 | CH1_G1m17 | Hinge | CH2_GAIE | CH3_LS_G1m17,1 |
| G1m17,1 | | | | | | |
| GAIE LS | | | | | | |
| PGDM1400 VH | G1m17,1 | PGDM1400 | CH1_G1m17 | Hinge | CH2_GA | CH3_LS_G1m17,1 |
| G1m17,1 GA | | | | | | |
| LS | | | | | | |
| PGDM1400 VH | G1m17,1 | PGDM1400 | CH1_G1m17 | Hinge | CH2_IE | CH3_LS_G1m17,1 |
| G1m17,1 IE | | | | | | |
| LS | | | | | | |
| PGDM1400 VH | G1m17,1 | PGDM1400 | CH1_G1m17 | Hinge | CH2_GAALIE | CH3_cah_LS_G1m17,1 |
| G1m17,1 | | | | | | |
| GAALIE cah LS | | | | | | |
| PGDM1400 VH | G1m17,1 | PGDM1400 | CH1_G1m17 | Hinge | CH2_GAIE | CH3_cah_LS_G1m17,1 |
| G1m17,1 | | | | | | |
| GAIE cah LS | | | | | | |
| PGDM1400 VH | G1m17,1 | PGDM1400 | CH1_G1m17 | Hinge | CH2_GA | CH3_cah_LS_G1m17,1 |
| G1m17,1 GA | | | | | | |
| cah LS | | | | | | |
| PGDM1400 VH | G1m17,1 | PGDM1400 | CH1_G1m17 | Hinge | CH2_IE | CH3_cah_LS_G1m17,1 |
| G1m17,1 IE | | | | | | |
| cah LS | | | | | | |
| PGDM1400 VH | G1m17,1 | PGDM1400 | CH1_G1m17 | Hinge | CH2_GAALIE | CH3_cak_LS_G1m17,1 |
| G1m17,1 | | | | | | |
| GAALIE cak LS | | | | | | |
| PGDM1400 VH | G1m17,1 | PGDM1400 | CH1_G1m17 | Hinge | CH2_GAIE | CH3_cak_LS_G1m17,1 |
| G1m17,1 | | | | | | |
| GAIE cak LS | | | | | | |
| PGDM1400 VH | G1m17,1 | PGDM1400 | CH1_G1m17 | Hinge | CH2_GA | CH3_cak_LS_G1m17,1 |
| G1m17,1 GA | | | | | | |
| cak LS | | | | | | |
| PGDM1400 VH | G1m17,1 | PGDM1400 | CH1_G1m17 | Hinge | CH2_IE | CH3_cak_LS_G1m17,1 |
| G1m17,1 IE | | | | | | |
| cak LS | | | | | | |

| IgG Format - | | | | | | |
|---|---|---|---|---|---|---|
| Light Chain | — | VL | CL | — | — | — |
| PGDM1400 VL | — | PGDM1400 | Ck | — | — | — |
| Ck | | | | | | |

### B. CrossMab^{CH1-CLx}

[0502] The present disclosure also provides technologies that can be used to deliver and express an antibody agent as described herein in “CrossMab” format (see e.g., WO2015/101588 A1, WO 2009/080253A1, and Schaefer, W. et al., PNAS, 108, 11187-1191, 2011, which are herein incorporated by reference in their entirety). In some embodiments, antibody agents in CrossMab format contain a CL-CH₁ crossover in one or both binding arms (referred to herein as “CrossMab^{CH1-CLx}” or “CH₁-CLx”). Such a modification reduces the byproduct formation caused by a mismatch of a light chain of a first antibody that specifically binds to a first antigen with the wrong heavy chain of a second antibody that specifically binds to a second antigen (when compared to approaches without such domain exchanges).

[0503] In some embodiments, an antibody agent encoded by one or more polyribonucleotides provided herein comprises a first immunoglobulin chain and a second immunoglobulin chain. In some embodiments, a polyribonucleotide may encode a first immunoglobulin chain and a second immunoglobulin chain of a CrossMab^{CH1-CLx} antibody agent as described herein. In some embodiments, a polyribonucleotide encoding a first immunoglobulin chain comprises a ribonucleic acid sequence encoding a VH domain, a CL domain, a hinge domain, a CH₂ domain, and a CH₃ domain. In some embodiments, a polyribonucleotide encoding a second immunoglobulin chain comprises a ribonucleic acid sequence encoding a light chain variable (VL) domain and a CH₁ domain (see e.g., FIG. 4, Panel B). In some embodiments, a polyribonucleotide encoding a CrossMab^{CH1-CLx} antibody agent comprises a ribonucleic acid sequence that encodes any one of the immunoglobulin chain configurations in Table 4, corresponding to SEQ ID NOs: 266-361, 1317-1318, 1329-1330, 1332-1333, 1335-1336, and 1338-1339. In some embodiments, a polyribonucleotide encoding a CrossMab^{CH1-CLx} agent antibody comprises a ribonucleic acid sequence that encodes any one of the immunoglobulin chain configurations in Table 4, corresponding to SEQ ID NOs: 844-847 and 1230-1321.

[0504] In some embodiments, a CrossMab^{CH1-CLx} antibody agent may be encoded by two separate polyribonucleotide: a first polyribonucleotide comprising a coding region that encodes (in 5′ to 3′ order): a heavy chain variable domain (VH), a light chain constant region (CL), a hinge region, a CH₂ domain, and a CH₃ domain (see e.g., FIG. 9, Panel A); and a second polyribonucleotide comprising a coding region that encodes (in 5′ to 3′ order): a light chain variable domain (VL) and a CH₁ domain (see e.g., FIG. 9, Panel B).

[0505] In some embodiments, a CrossMab^{CH1-CLx} antibody agent encoded by one or more polyribonucleotides provided herein includes all or part of a PGDM1400 antibody. In some embodiments, a CrossMab^{CH1-CLx} antibody agent comprises a heavy chain variable domain comprising: (i) HCDR1 (SEQ ID NO: 18); (ii) HCDR2 SEQ ID NO: 21); (iii) HCDR3 (SEQ ID NO: 24); or (iv) a combination thereof. In some embodiments, a CrossMab^{CH1-CLx} antibody agent comprises a heavy chain variable domain comprising: (i) HCDR1 (SEQ ID NO: 18); (ii) HCDR2 (SEQ ID NO: 21); and (iii) HCDR3 (SEQ ID NO: 24). In some embodiments, a CrossMab^{CH1-CLx} antibody agent comprises a light chain variable domain comprising: (i) LCDR1 (SEQ ID NO: 27); (ii) LCDR2 (LAS; SEQ ID NO: 30); (iii) LCDR3 (SEQ ID NO: 33); or (iv) a combination thereof. In some embodiments, a CrossMab^{CH1-CLx} antibody agent comprises a light chain variable domain comprising: (i) LCDR1 (SEQ ID NO: 27); (ii) LCDR2 (LAS; SEQ ID NO: 30); and (iii) LCDR3 (SEQ ID NO: 33). In some embodiments, a CrossMab^{CH1-CLx} antibody agent comprises (a) a heavy chain variable domain comprising: (i) HCDR1 (SEQ ID NO: 18); (ii) HCDR2 (SEQ ID NO: 21); (iii) HCDR3 (SEQ ID NO: 24); or (iv) a combination thereof; and (b) a light chain variable domain comprising: (i) LCDR1 (SEQ ID NO: 27); (ii) LCDR2 (LAS; SEQ ID NO: 30); (iii) LCDR3 (SEQ ID NO: 33); or (iv) a combination thereof. In some embodiments, a CrossMab^{CH1-CLx} antibody agent comprises (a) a heavy chain variable domain comprising: (i) HCDR1 (SEQ ID NO: 18); (ii) HCDR2 (SEQ ID NO: 21); and (iii) HCDR3 (SEQ ID NO: 24); and (b) a light chain variable domain comprising: (i) LCDR1 (SEQ ID NO: 27); (ii) LCDR2 (LAS; SEQ ID NO: 30); and (iii) LCDR3 (SEQ ID NO: 33).

[0506] In some embodiments, a polyribonucleotide described herein encodes an immunoglobulin chain of a CrossMab^{CH1-CLx} antibody agent, wherein the immunoglobulin chain comprises a heavy chain variable domain, and wherein the heavy chain variable domain comprises: (i) HCDR1 (SEQ ID NO: 18); (ii) HCDR2 (SEQ ID NO: 21); (iii) HCDR3 (SEQ ID NO: 24); or (iv) a combination thereof. In some embodiments, a polyribonucleotide described herein encodes an immunoglobulin chain of a CrossMab^{CH1-CLx} antibody agent, wherein the immunoglobulin chain comprises a heavy chain variable domain, and wherein the heavy chain variable domain comprises: (i) HCDR1 (SEQ ID NO: 18); (ii) HCDR2 (SEQ ID NO: 21); and (iii) HCDR3 (SEQ ID NO: 24). In some embodiments, a polyribonucleotide described herein encodes an immunoglobulin chain of a CrossMab^{CH1-CLx} antibody agent, wherein the immunoglobulin chain comprises a light chain variable domain, and wherein the light chain variable domain comprises: (i) LCDR1 (SEQ ID NO: 27); (ii) LCDR2 (LAS; SEQ ID NO: 30); (iii) LCDR3 (SEQ ID NO: 33); or (iv) a combination thereof. In some embodiments, a polyribonucleotide described herein encodes an immunoglobulin chain of a CrossMab^{CH1-CLx} antibody agent, wherein the immunoglobulin chain comprises a light chain variable domain, and wherein the light chain variable domain comprises: (i) LCDR1 (SEQ ID NO: 27); (ii) LCDR2 (LAS; SEQ ID NO: 30); and (iii) LCDR3 (SEQ ID NO: 33). In some embodiments, a polyribonucleotide described herein encodes two immunoglobulin chains of a CrossMab^{CH1-CLx} antibody agent: a first immunoglobulin chain comprising a heavy chain variable domain, wherein the heavy chain variable domain comprises: (i) HCDR1 (SEQ ID NO: 18); (ii) HCDR2 (SEQ ID NO: 21); (iii) HCDR3 (SEQ ID NO: 24); or (iv) a combination thereof; and a second immunoglobulin chain comprising a light chain variable domain, wherein the light chain variable domain comprises (i) LCDR1 (SEQ ID NO: 27); (ii) LCDR2 (LAS; SEQ ID NO: 30); (iii) LCDR3 (SEQ ID NO: 33); or (iv) a combination thereof. In some embodiments, a polyribonucleotide described herein encodes two immunoglobulin chains of a CrossMab^{CH1-CLx} antibody agent: a first immunoglobulin chain comprising a heavy chain variable domain, wherein the heavy chain variable domain comprises: (i) HCDR1 (SEQ ID NO: 18); (ii) HCDR2 (SEQ ID NO: 21); and (iii) HCDR3 (SEQ ID NO: 24); and a second immunoglobulin chain comprising a light chain variable domain, wherein the light chain variable domain comprises: (i) LCDR1 (SEQ ID NO: 27); (ii) LCDR2 (LAS; SEQ ID NO: 30); and (iii) LCDR3 (SEQ ID NO: 33).

[0507] In some embodiments, a CrossMab^{CH1-CLx} antibody agent encoded by one or more polyribonucleotides provided herein comprises a heavy chain variable domain having at least 80%, 85%, 90%, 91%, 92%, 93%, 94%, 95%, 96%, 97%, 98%, or 99% sequence identity to an amino acid sequence represented by SEQ ID NO: 36. In some embodiments, a CrossMab^{CH1-CLx} antibody agent encoded by one or more polyribonucleotides provided herein comprises a light chain variable domain having at least 80%, 85%, 90%, 91%, 92%, 93%, 94%, 95%, 96%, 97%, 98%, or 99% identity to an amino acid sequence represented by SEQ ID NO: 43. In some embodiments, a CrossMab^{CH1-CLx} antibody agent encoded by one or more polyribonucleotides provided herein comprises a heavy chain variable domain represented by SEQ ID NO: 36. In some embodiments, a CrossMab^{CH1-CLx} antibody agent encoded by one or more polyribonucleotides provided herein comprises a light chain variable domain represented by SEQ ID NO: 43.

[0508] In some embodiments, a CrossMab^{CH1-CLx} antibody agent encoded by one or more polyribonucleotides provided herein comprises a heavy chain variable domain having at least 80%, 85%, 90%, 91%, 92%, 93%, 94%, 95%, 96%, 97%, 98%, or 99% sequence identity to an amino acid sequence represented by SEQ ID NO: 1494. In some embodiments, a CrossMab^{CH1-CLx} antibody agent encoded by one or more polyribonucleotides provided herein comprises a light chain variable domain having at least 80%, 85%, 90%, 91%, 92%, 93%, 94%, 95%, 96%, 97%, 98%, or 99% identity to an amino acid sequence represented by SEQ ID NO: 43. In some embodiments, a CrossMab^{CH1-CLx} antibody agent encoded by one or more polyribonucleotides provided herein comprises a heavy chain variable domain represented by SEQ ID NO: 1494. In some embodiments, a CrossMab^{CH1-CLx} antibody agent encoded by one or more polyribonucleotides provided herein comprises a light chain variable domain represented by SEQ ID NO: 43.

[0509] In some embodiments, an antibody agent (e.g., a PGDM1400 antibody agent) encoded by one or more polyribonucleotides provided herein comprises a heavy chain variable domain that comprises one or more mutations relative to an amino acid sequence represented by SEQ ID NO: 1494. In some embodiments, substitution mutations are present at residues 3 and/or 5 relative to SEQ ID NO: 1494. In some embodiments, a substitution mutation at residue 3 results in a positively charged amino acid being present at residue 3 relative to SEQ ID NO: 1494. Positively charged amino acids include Lys (K), Arg (R), and His (H). In some embodiments, a substitution mutation at residue 3 relative to SEQ ID NO: 1494 comprises Q3H. In some embodiments, a substitution mutation at residue 5 results in a polar amino acid being present at residue 5 relative to SEQ ID NO: 1494. Polar amino acids include Ser (S), Thr (T), Tyr (Y), Asn (N), and Gln (Q). In some embodiments, a substitution mutation at residue 5 relative to SEQ ID NO: 1494 comprises V5T.

[0510] In some embodiments, an antibody agent (e.g., a PGDM1400 antibody agent) encoded by one or more polyribonucleotides provided herein comprises a heavy chain variable domain that comprises SEQ ID NO: 1494 with substitution mutations Q3H and V5T.

[0511] In some embodiments, a polyribonucleotide described herein encodes an immunoglobulin chain of a CrossMab^{CH1-CLx} antibody agent, wherein the immunoglobulin chain comprises a heavy chain variable domain having at least 80%, 85%, 90%, 91%, 92%, 93%, 94%, 95%, 96%, 97%, 98%, or 99% sequence identity to an amino acid sequence represented by SEQ ID NO: 36. In some embodiments, a polyribonucleotide described herein encodes an immunoglobulin chain of a CrossMab^{CH1-CLx} antibody agent, wherein the immunoglobulin chain comprises a light chain variable domain having at least 80%, 85%, 90%, 91%, 92%, 93%, 94%, 95%, 96%, 97%, 98%, or 99% identity to an amino acid sequence represented by SEQ ID NO: 43. In some embodiments, a polyribonucleotide described herein encodes an immunoglobulin chain of a CrossMab^{CH1-CLx} antibody agent, wherein the immunoglobulin chain comprises a heavy chain variable domain represented by SEQ ID NO: 36. In some embodiments, a polyribonucleotide described herein encodes an immunoglobulin chain of a CrossMab^{CH1-CLx} antibody agent, wherein the immunoglobulin chain comprises a light chain variable domain represented by SEQ ID NO: 43.

[0512] As described above, CrossMab^{CH1-CLx} antibody agents encoded by one or more polyribonucleotides as described herein may comprise one or more heavy chain constant domains. In some embodiments, one or more heavy chain constant domains comprise a CH₃ domain. In some embodiments, a CrossMab^{CH1-CLx} antibody agent encoded by one or more polyribonucleotides as described herein comprises a CH₃ domain that comprises a G1m3, G1m17, or a G1m17,1 allotype. In some embodiments, a CrossMab^{CH1-CLx} antibody agent encoded by one or more polyribonucleotides as described herein comprises a CH₃ domain having an amino acid sequence at least 90%, 91%, 92%, 93%, 94%, 95%, 96%, 97%, 98%, or 99% identical to a sequence represented in any one of SEQ ID NOs: 113, 116, 119, 122, 125, 128, 131, 134, 137, 140, 143, 146, or 1494. In some embodiments, a CrossMab^{CH1-CLx} antibody agent encoded by one or more polyribonucleotides as described herein comprises a CH₃ domain having an amino acid sequence represented in any one of SEQ ID NOs: 113, 116, 119, 122, 125, 128, 131, 134, 137, 140, 143, 146, or 1495. In some embodiments, a CH₃ domain comprises amino acid sequence SEQ ID NO: 1495 with substitution mutations D16E and L18M.

[0513] CrossMab^{CH1-CLx} antibody agents encoded by one or more polyribonucleotides as described herein may comprise one or more heavy chain constant domains comprising an amino acid modification (e.g., a substitution or deletion) at one or more amino acid positions. For example, a CrossMab^{CH1-CLx} antibody agent encoded by one or more polyribonucleotides as described herein may include an L/S mutation within a CH₃ region (for enhanced FcRn binding) (see Zalevsky J et al., Nat Biotechnol. 2010, which is herein incorporated by reference). Such mutations are noted as M428L and N434S according to EU numbering (i.e., M88L and N94S within the CH₃ domain, e.g., SEQ ID NO: 113, 116, or 1495), and referred to herein as “LS” or “L/S” (see e.g., FIG. 5, Panel D). In some embodiments, a CrossMab^{CH1-CLx} antibody agent encoded by one or more polyribonucleotides as described herein comprise an E294 deletion (for Fc hypersialylation) (see Bas M et al., J Immunol 2019, which is herein incorporated by reference).

[0514] In some embodiments, a CrossMab^{CH1-CLx} antibody agent encoded by one or more polyribonucleotides as described herein comprises a CH₃ domain comprising one or more of the following mutations: Y349C, T366S, L368A, and Y407V (according to EU numbering). This combination of mutations is referred to herein as “cah”. In some embodiments, a CrossMab^{CH1-CLx} antibody agent encoded by one or more polyribonucleotides as described herein comprises a CH₃ domain comprising one or more mutations selected from: S354C and T366W (according to EU numbering). This combination of CH₃ mutations is referred to herein as “cak”.

[0515] In some embodiments, a polyribonucleotide encodes a CH₃ domain that comprises one of the following substitution mutations: M428L, N434S, or a combination thereof (e.g., an “L/S” mutation). In some embodiments, a polyribonucleotide comprises a CH₃ ribonucleic acid sequence that comprises any one of SEQ ID NOs: 117 and 135. In some embodiments, a polyribonucleotide encodes a CH₃ domain that comprises one of the following substitution mutations: Y349C, T366S, L368A, and Y407V (according to EU numbering). In some embodiments, a polyribonucleotide comprises a ribonucleic acid sequence according to SEQ ID NO: 120 and 138. In some embodiments, a polyribonucleotide encodes a CH₃ domain that comprises one of the following substitution mutations: S354C and T366W (according to EU numbering). In some embodiments, a polyribonucleotide comprises a ribonucleic acid sequence according to SEQ ID NO: 126 and 144.

[0516] In some embodiments, a polyribonucleotide encodes an immunoglobulin chain that comprises a VH domain operably linked to one or more constant domains, where the one or more constant domains comprise a CH₃ domain. In some embodiments, a polyribonucleotide comprises a ribonucleic acid sequence according to SEQ ID NO: 114. In some embodiments, polyribonucleotide comprises a CH₃ ribonucleic acid sequence that encodes the CH₃ domain that comprises a G1m3, G1m17, or a G1m17,1 allotype. In some embodiments, a polyribonucleotide comprises a CH₃ ribonucleic acid sequence that comprises any one of SEQ ID NOs: 114 and 132.

[0517] In some embodiments, a CrossMab^{CH1-CLx} antibody agent encoded by one or more polyribonucleotides as described herein comprises a light chain constant domain. In some embodiments, a light chain constant domain comprises a kappa light chain constant domain. In some embodiments, a CrossMab^{CH1-CLx} antibody agent encoded by one or more polyribonucleotides as described herein comprises a kappa light chain constant domain having an amino acid sequence at least 80, 85, 90%, 91%, 92%, 93%, 94%, 95%, 96%, 97%, 98%, or 99% identical to SEQ ID NO: 153. In some embodiments, a CrossMab^{CH1-CLx} antibody agent encoded by one or more polyribonucleotides as described herein comprises a kappa light chain constant domain having an amino acid sequence represented in SEQ ID NO: 153. In some embodiments, a CrossMab^{CH1-CLx} antibody agent encoded by one or more polyribonucleotides as described herein comprises a lambda chain variable domain.

[0518] In some embodiments, a CrossMab^{CH1-CLx} antibody agent encoded by one or more polyribonucleotides as described herein comprises a hinge domain. In some embodiments, a CrossMab^{CH1-CLx} antibody agent encoded by one or more polyribonucleotides as described herein comprises a hinge domain that comprises an amino acid sequence represented in SEQ ID NO: 161 (herein referred to as “hinge” in Tables 2 and 4).

[0519] In some embodiments, a polyribonucleotide encodes a hinge domain. In some embodiments, a polyribonucleotide encodes a hinge ribonucleic acid sequence that represented in SEQ ID NO: 162. In some embodiments, a polyribonucleotide encodes a hinge domain that comprises an amino acid modification that comprises a deletion of one or more amino acid residues. In some embodiments, a polyribonucleotide encodes a hinge domain an amino acid modification that comprises a deletion of amino acid residues EPKSC in a conventional Ig hinge domain (represented in SEQ ID NO: 161). Such a modification is referred to herein as “Hinge_del” or “ΔEPKSC”. In some embodiments, a polyribonucleotide encodes a hinge ribonucleic acid sequence represented in SEQ ID NO: 168. In some embodiments, a polyribonucleotide encodes a hinge domain that comprises an amino acid modification that comprises a C220S mutation (according to EU numbering). Such a mutated hinge domain is referred to herein as “Hinge_S” or “C/S”. In some embodiments, a polyribonucleotide encodes a hinge ribonucleic acid sequence represented in SEQ ID NO: 165.

[0520] In some embodiments, a CrossMab^{CH1-CLx} antibody agent encoded by one or more polyribonucleotides as described herein comprises a CH₂ domain. In some embodiments, a CrossMab^{CH1-CLx} antibody agent encoded by one or more polyribonucleotides as described herein comprises a CH₂ domain having an amino acid sequence at least 90%, 91%, 92%, 93%, 94%, 95%, 96%, 97%, 98%, or 99% identical to represented in SEQ ID NO: 96. In some embodiments, a CrossMab^{CH1-CLx} antibody agent encoded by one or more polyribonucleotides as described herein comprises a CH₂ domain having an amino acid sequence represented in SEQ ID NO: 96.

[0521] In some embodiments, a CrossMab^{CH1-CLx} antibody agent encoded by one or more polyribonucleotides as described herein comprises a CH₂ domain having one or more mutations (e.g., with respect to SEQ ID NO: 96). For example, in some embodiments, a CrossMab^{CH1-CLx} antibody agent encoded by one or more polyribonucleotides as described herein comprises one or more of the following mutations: G236A, A330L, and I332E (according to EU numbering). Such a combination of mutations is referred to herein as “GAALIE”. Such mutations in the CH₂ domain have been associated with increased affinity to Fc receptors FcgRIIA and FcgRIII for enhanced antibody effector function.

[0522] In some embodiments, a CrossMab^{CH1-CLx} antibody agent encoded by one or more polyribonucleotides as described herein comprises a CH₂ domain having an amino acid sequence that is at least 90%, 91%, 92%, 93%, 94%, 95%, 96%, 97%, 98%, or 99% identical to SEQ ID NO: 99 or 102. In some embodiments, a CrossMab^{CH1-CLx} antibody agent encoded by one or more polyribonucleotides as described herein comprises a CH₂ domain having an amino acid sequence represented in SEQ ID NO: 99 or 102.

[0523] In some embodiments, a CrossMab^{CH1-CLx} antibody agent encoded by one or more polyribonucleotides as described herein comprises one or more mutations selected from: G236A and I332E (according to EU numbering). Such a combination of CH₂ mutations is referred to herein as “GAIE”. In some embodiments, a CrossMab^{CH1-CLx} antibody agent encoded by one or more polyribonucleotides as described herein comprises a CH₂ domain having an amino acid sequence at least 90%, 91%, 92%, 93%, 94%, 95%, 96%, 97%, 98%, or 99% identical to SEQ ID NO: 104. In some embodiments, a CrossMab^{CH1-CLx} antibody agent encoded by one or more polyribonucleotides as described herein comprises a CH₂ domain having an amino acid sequence represented in SEQ ID NO: 104.

[0524] In some embodiments, a CrossMab^{CH1-CLx} antibody agent encoded by one or more polyribonucleotides as described herein comprises a mutation: G236A (according to EU numbering), referred to herein as “GA”. In some embodiments, a CrossMab^{CH1-CLx} antibody agent encoded by one or more polyribonucleotides as described herein comprises a CH₂ domain having an amino acid sequence at least 90%, 91%, 92%, 93%, 94%, 95%, 96%, 97%, 98%, or 99% identical to SEQ ID NO: 107. In some embodiments, a CrossMab^{CH1-CLx} antibody agent encoded by one or more polyribonucleotides as described herein comprises a CH₂ domain having an amino acid sequence represented in SEQ ID NO: 107.

[0525] In some embodiments, a CrossMab^{CH1-CLx} antibody agent encoded by one or more polyribonucleotides as described herein comprises a mutation: I332E (according to EU numbering), referred to herein as “IE”. In some embodiments, a CrossMab^{CH1-CLx} antibody agent encoded by one or more polyribonucleotides as described herein comprises a CH₂ domain having an amino acid sequence at least 90%, 91%, 92%, 93%, 94%, 95%, 96%, 97%, 98%, or 99% identical to SEQ ID NO: 110. In some embodiments, a CrossMab^{CH1-CLx} antibody agent encoded by one or more polyribonucleotides as described herein comprises a CH₂ domain having an amino acid sequence represented in SEQ ID NO: 110.

[0526] In some embodiments, a polyribonucleotide encodes an immunoglobulin chain that comprises a VH domain operably linked to one or more constant domains, wherein the one or more constant domains comprise a CH₂ domain. In some embodiments, a polyribonucleotide comprises a ribonucleic acid sequence that according to SEQ ID NO: 97. In some embodiments, a CH₂ ribonucleic acid encodes a CH₂ domain with one or more amino acid substitution mutations. For example, in some embodiments, a CH₂ ribonucleic acid sequence encodes one or more of the following mutations: G236A, A330L, and I332E (according to EU numbering), referred to herein as “GAALIE”. Such mutations in the CH₂ domain have been associated with increased affinity to Fc receptors FcgRIIA and FcgRIII for enhanced antibody effector function. In some embodiments, a CH₂ ribonucleic sequence comprises or consists of a sequence according to SEQ ID NO: 100 or 103. In some embodiments, a CH₂ ribonucleic acid sequence encodes the one or more of the following mutations: G236A and I332E (according to EU numbering), referred to herein as “GAIE”. In some embodiments, a CH₂ ribonucleic sequence comprises of a sequence according to SEQ ID NO: 105. In some embodiments, a CH₂ ribonucleic acid sequence encodes the mutation G236A (according to EU numbering), referred to herein as “GA”. In some embodiments, a CH₂ ribonucleic sequence comprises of a sequence according to SEQ ID NO: 108. In some embodiments, a CH₂ ribonucleic acid sequence encodes the mutation: I332E (according to EU numbering), referred to herein as “IE”. In some embodiments, a CH₂ ribonucleic sequence comprises of a sequence according to SEQ ID NO: 111. In some embodiments, a CH₂ ribonucleic acid sequence encodes a CH₂ domain that comprises a E294 deletion (according to EU numbering), referred to herein as “E294del”.

[0527] In some embodiments, a CrossMab^{CH1-CLx} antibody agent encoded by one or more polyribonucleotides as described herein comprises a CH₁ domain. In some embodiments, a CrossMab^{CH1-CLx} antibody agent encoded by one or more polyribonucleotides as described herein comprises a CH₁ domain that comprises a G1m3 allotype. In some embodiments, a CrossMab^{CH1-CLx} antibody agent encoded by one or more polyribonucleotides as described herein comprises a CH₁ domain that comprises a G1m17 allotype. In some embodiments, a CrossMab^{CH1-CLx} antibody agent encoded by one or more polyribonucleotides as described herein comprises a CH₁ domain that comprises an amino acid sequence represented in SEQ ID NO: 76 or 81.

[0528] In some embodiments, a polyribonucleotide encodes an immunoglobulin chain that comprises a VH domain operably linked to one or more constant domains, where the one or more constant domains comprise a CH₁ domain. In some embodiments, a polyribonucleotide comprises a CH₁ ribonucleic acid sequence according to SEQ ID NO: 77 or 79. In some embodiments, a polyribonucleotide encodes a CH₁ domain that comprises a G1m3 allotype. In some embodiments, a polyribonucleotide encodes a CH₁ domain that comprises a G1m17 allotype. In some embodiments, a polyribonucleotide encodes a CH₁ ribonucleic acid sequence according to SEQ ID NO: 77, 79, or 82.

[0529] In some embodiments, a polyribonucleotide encodes a CH₁ domain that comprises one or more mutations. In some embodiments, a polyribonucleotide encodes a CH₁ domain that comprises the addition of one or more serine residues. In some embodiments, a polyribonucleotide encodes a CH₁ domain that comprises addition of two additional serine residues (referred to herein as “SS”). In some embodiments, a polyribonucleotide encodes a CH₁ ribonucleic acid sequence that is at least 90%, 91%, 92%, 93%, 94%, 95%, 96%, 97%, 98%, or 99% identical to SEQ ID NO: 91 or 94. In some embodiments, a polyribonucleotide encodes a CH₁ ribonucleic acid sequence represented in SEQ ID NO: 91 or 94. In some embodiments, a polyribonucleotide encodes a CH₁ domain that comprises one or more charge variant mutations. In some embodiments, a polyribonucleotide encodes a CH₁ domain comprising one or more substitution mutations selected from: K147E, K213D, or a combination thereof. In some embodiments, a polyribonucleotide encodes a CH₁ ribonucleic acid sequence that has at least 90%, 91%, 92%, 93%, 94%, 95%, 96%, 97%, 98%, or 99% sequence identity to SEQ ID NO: 85 or 88. In some embodiments, a polyribonucleotide encodes a CH₁ ribonucleic acid sequence according to SEQ ID NO: 85 or 88.

[0530] In some embodiments, a CrossMab^{CH1-CLx} antibody agent encoded by one or more polyribonucleotides as described herein comprises a signal peptide comprising a husec2 signal peptide. In some embodiments, a CrossMab^{CH1-CLx} antibody agent encoded by one or more polyribonucleotides as described herein comprises a signal peptide comprising SEQ ID NO: 1.

[0531] In some embodiments, a CrossMab^{CH1-CLx} antibody agent encoded by one or more polyribonucleotides as described herein comprises an immunoglobulin chain encoded by a nucleic acid sequence that has at least 80%, 85%, 90%, 91%, 92%, 93%, 94%, 95%, 96%, 97%, 98%, or 99% sequence identity to a sequence represented by SEQ ID NOs: 266-361, 1317-1318, 1329-1330, 1332-1333, 1335-1336, 1338-1339 (heavy chain) and SEQ ID NOs: 844-847, 1320-1321 (light chain). In some embodiments, a CrossMab^{CH1-CLx} antibody agent encoded by one or more polyribonucleotides as described herein comprises an immunoglobulin chain encoded by a nucleic acid sequence represented by any one of SEQ ID NOs: 266-361, 1317-1318, 1329-1330, 1332-1333, 1335-1336, 1338-1339 (heavy chain) and SEQ ID NOs: 844-847, 1320-1321 (light chain).

[0532] In some embodiments, a CrossMab^{CH1-CLx} antibody agent encoded by one or more polyribonucleotides as described herein comprises an immunoglobulin chain comprising an amino acid sequence that has at least 80%, 85%, 90%, 91%, 92%, 93%, 94%, 95%, 96%, 97%, 98%, or 99% sequence identity to a sequence represented by SEQ ID NOs: 1319, 1331, 1334, 1337, 1340 (heavy chain) and SEQ ID NOs: 1322 (light chain). In some embodiments, a CrossMab^{CH1-CLx} antibody agent encoded by one or more polyribonucleotides as described herein comprises an immunoglobulin chain comprising an amino acid sequence represented by any one of SEQ ID NOs: 1319, 1331, 1334, 1337, 1340 (heavy chain) 1322 (heavy chain) and SEQ ID NO: 1322 (light chain).

[0533] Exemplary heavy chain and light chain configurations of a CrossMab^{CH1-CLx} antibody agent, as described herein, are shown in Table 4 below.

TABLE 4
Exemplary CrossMab^{CH1-CLx} Chain Configurations

| CrossMab^{CH1-CLx} | | | | | | |
|---|---|---|---|---|---|---|
| format Heavy Chain | Allotype | VH | CL | Hinge | CH2 | CH3 |
| PGDM1400 VH G1m3 | G1m3 | PGDM1400 | Ck_ASE | Hinge_del | CH2 | CH3_G1m3/17 |
| Ck(AS/Q124E) del216- | | | | | | |
| 220 | | | | | | |
| PGDM1400 VH G1m3 | G1m3 | PGDM1400 | Ck_ASE | Hinge_del | CH2 | CH3_LS_G1m3/17 |
| Ck(AS/Q124E) del216- | | | | | | |
| 220 LS | | | | | | |
| PGDM1400 VH G1m3 | G1m3 | PGDM1400 | Ck_ASE | Hinge_del | CH2_GAALIE | CH3_LS_G1m3/17 |
| Ck(AS/Q124E) del216- | | | | | | |
| 220 GAALIE LS | | | | | | |
| PGDM1400 VH G1m3 | G1m3 | PGDM1400 | Ck_ASE | Hinge_del | CH2_GAIE | CH3_LS_G1m3/17 |
| Ck(AS/Q124E) del216- | | | | | | |
| 220 GAIE LS | | | | | | |
| PGDM1400 VH G1m3 | G1m3 | PGDM1400 | Ck_ASE | Hinge_del | CH2_GA | CH3_LS_G1m3/17 |
| Ck(AS/Q124E) del216- | | | | | | |
| 220 GA LS | | | | | | |
| PGDM1400 VH G1m3 | G1m3 | PGDM1400 | Ck_ASE | Hinge_del | CH2_IE | CH3_LS_G1m3/17 |
| Ck(AS/Q124E) del216- | | | | | | |
| 220 IE LS | | | | | | |
| PGDM1400 VH G1m3 | G1m3 | PGDM1400 | Ck_ASE | Hinge_del | CH2 | CH3_cah_LS_G1m3/17 |
| Ck(AS/Q124E) del216- | | | | | | |
| 220 cah LS | | | | | | |
| PGDM1400 VH G1m3 | G1m3 | PGDM1400 | Ck_ASE | Hinge_del | CH2_GAALIE | CH3_cah_LS_G1m3/17 |
| Ck(AS/Q124E) del216- | | | | | | |
| 220 GAALIE cah LS | | | | | | |
| PGDM1400 VH G1m3 | G1m3 | PGDM1400 | Ck_ASE | Hinge_del | CH2_GAIE | CH3_cah_LS_G1m3/17 |
| Ck(AS/Q124E) del216- | | | | | | |
| 220 GAIE cah LS | | | | | | |
| PGDM1400 VH G1m3 | G1m3 | PGDM1400 | Ck_ASE | Hinge_del | CH2_GA | CH3_cah_LS_G1m3/17 |
| Ck(AS/Q124E) del216- | | | | | | |
| 220 GA cah LS | | | | | | |
| PGDM1400 VH G1m3 | G1m3 | PGDM1400 | Ck_ASE | Hinge_del | CH2_IE | CH3_cah_LS_G1m3/17 |
| Ck(AS/Q124E) del216- | | | | | | |
| 220 IE cah LS | | | | | | |
| PGDM1400 VH G1m3 | G1m3 | PGDM1400 | Ck_ASE | Hinge_del | CH2 | CH3_cak_LS_G1m3/17 |
| Ck(AS/Q124E) del216- | | | | | | |
| 220 cak LS | | | | | | |
| PGDM1400 VH G1m3 | G1m3 | PGDM1400 | Ck_ASE | Hinge_del | CH2_GAALIE | CH3_cak_LS_G1m3/17 |
| Ck(AS/Q124E) del216- | | | | | | |
| 220 GAALIE cak LS | | | | | | |
| PGDM1400 VH G1m3 | G1m3 | PGDM1400 | Ck_ASE | Hinge_del | CH2_GAIE | CH3_cak_LS_G1m3/17 |
| Ck(AS/Q124E) del216- | | | | | | |
| 220 GAIE cak LS | | | | | | |
| PGDM1400 VH G1m3 | G1m3 | PGDM1400 | Ck_ASE | Hinge_del | CH2_GA | CH3_cak_LS_G1m3/17 |
| Ck(AS/Q124E) del216- | | | | | | |
| 220 GA cak LS | | | | | | |
| PGDM1400 VH G1m3 | G1m3 | PGDM1400 | Ck_ASE | Hinge_del | CH2_IE | CH3_cak_LS_G1m3/17 |
| Ck(AS/Q124E) del216- | | | | | | |
| 220 IE cak LS | | | | | | |
| PGDM1400 VH G1m17 | G1m17 | PGDM1400 | Ck_ASE | Hinge_del | CH2 | CH3_G1m3/17 |
| Ck(AS/Q124E) del216- | | | | | | |
| 220 | | | | | | |
| PGDM1400 VH G1m17 | G1m17 | PGDM1400 | Ck_ASE | Hinge_del | CH2 | CH3_LS_G1m3/17 |
| Ck(AS/Q124E) del216- | | | | | | |
| 220 LS | | | | | | |
| PGDM1400 VH G1m17 | G1m17 | PGDM1400 | Ck_ASE | Hinge_del | CH2_GAALIE | CH3_LS_G1m3/17 |
| Ck(AS/Q124E) del216- | | | | | | |
| 220 GAALIE LS | | | | | | |
| PGDM1400 VH G1m17 | G1m17 | PGDM1400 | Ck_ASE | Hinge_del | CH2_GAIE | CH3_LS_G1m3/17 |
| Ck(AS/Q124E) del216- | | | | | | |
| 220 GAIE LS | | | | | | |
| PGDM1400 VH G1m17 | G1m17 | PGDM1400 | Ck_ASE | Hinge_del | CH2_GA | CH3_LS_G1m3/17 |
| Ck(AS/Q124E) del216- | | | | | | |
| 220 GA LS | | | | | | |
| PGDM1400 VH G1m17 | G1m17 | PGDM1400 | Ck_ASE | Hinge_del | CH2_IE | CH3_LS_G1m3/17 |
| Ck(AS/Q124E) del216- | | | | | | |
| 220 IE LS | | | | | | |
| PGDM1400 VH G1m17 | G1m17 | PGDM1400 | Ck_ASE | Hinge_del | CH2 | CH3_cah_LS_G1m3/17 |
| Ck(AS/Q124E) del216- | | | | | | |
| 220 cah LS | | | | | | |
| PGDM1400 VH G1m17 | G1m17 | PGDM1400 | Ck_ASE | Hinge_del | CH2_GAALIE | CH3_cah_LS_G1m3/17 |
| Ck(AS/Q124E) del216- | | | | | | |
| 220 GAALIE cah LS | | | | | | |
| PGDM1400 VH G1m17 | G1m17 | PGDM1400 | Ck_ASE | Hinge_del | CH2_GAIE | CH3_cah_LS_G1m3/17 |
| Ck(AS/Q124E) del216- | | | | | | |
| 220 GAIE cah LS | | | | | | |
| PGDM1400 VH G1m17 | G1m17 | PGDM1400 | Ck_ASE | Hinge_del | CH2_GA | CH3_cah_LS_G1m3/17 |
| Ck(AS/Q124E) del216- | | | | | | |
| 220 GA cah LS | | | | | | |
| PGDM1400 VH G1m17 | G1m17 | PGDM1400 | Ck_ASE | Hinge_del | CH2_IE | CH3_cah_LS_G1m3/17 |
| Ck(AS/Q124E) del216- | | | | | | |
| 220 IE cah LS | | | | | | |
| PGDM1400 VH G1m17 | G1m17 | PGDM1400 | Ck_ASE | Hinge_del | CH2 | CH3_cak_LS_G1m3/17 |
| Ck(AS/Q124E) del216- | | | | | | |
| 220 cak LS | | | | | | |
| PGDM1400 VH G1m17 | G1m17 | PGDM1400 | Ck_ASE | Hinge_del | CH2_GAALIE | CH3_cak_LS_G1m3/17 |
| Ck(AS/Q124E) del216- | | | | | | |
| 220 GAALIE cak LS | | | | | | |
| PGDM1400 VH G1m17 | G1m17 | PGDM1400 | Ck_ASE | Hinge_del | CH2_GAIE | CH3_cak_LS_G1m3/17 |
| Ck(AS/Q124E) del216- | | | | | | |
| 220 GAIE cak LS | | | | | | |
| PGDM1400 VH G1m17 | G1m17 | PGDM1400 | Ck_ASE | Hinge_del | CH2_GA | CH3_cak_LS_G1m3/17 |
| Ck(AS/Q124E) del216- | | | | | | |
| 220 GA cak LS | | | | | | |
| PGDM1400 VH G1m17 | G1m17 | PGDM1400 | Ck_ASE | Hinge_del | CH2_IE | CH3_cak_LS_G1m3/17 |
| Ck(AS/Q124E) del216- | | | | | | |
| 220 IE cak LS | | | | | | |
| PGDM1400 VH G1m17,1 | G1m17,1 | PGDM1400 | Ck_ASE | Hinge_del | CH2 | CH3_G1m17,1 |
| Ck(AS/Q124E) del216- | | | | | | |
| 220 | | | | | | |
| PGDM1400 VH G1m17,1 | G1m17,1 | PGDM1400 | Ck_ASE | Hinge_del | CH2 | CH3_LS_G1m17,1 |
| Ck(AS/Q124E) del216- | | | | | | |
| 220 LS | | | | | | |
| PGDM1400 VH G1m17,1 | G1m17,1 | PGDM1400 | Ck_ASE | Hinge_del | CH2_GAALIE | CH3_LS_G1m17,1 |
| Ck(AS/Q124E) del216- | | | | | | |
| 220 GAALIE LS | | | | | | |
| PGDM1400 VH G1m17,1 | G1m17,1 | PGDM1400 | Ck_ASE | Hinge_del | CH2_GAIE | CH3_LS_G1m17,1 |
| Ck(AS/Q124E) del216- | | | | | | |
| 220 GAIE LS | | | | | | |
| PGDM1400 VH G1m17,1 | G1m17,1 | PGDM1400 | Ck_ASE | Hinge_del | CH2_GA | CH3_LS_G1m17,1 |
| Ck(AS/Q124E) del216- | | | | | | |
| 220 GA LS | | | | | | |
| PGDM1400 VH G1m17,1 | G1m17,1 | PGDM1400 | Ck_ASE | Hinge_del | CH2_IE | CH3_LS_G1m17,1 |
| Ck(AS/Q124E) del216- | | | | | | |
| 220 IE LS | | | | | | |
| PGDM1400 VH G1m17,1 | G1m17,1 | PGDM1400 | Ck_ASE | Hinge_del | CH2 | CH3_cah_LS_G1m17,1 |
| Ck(AS/Q124E) del216- | | | | | | |
| 220 cah LS | | | | | | |
| PGDM1400 VH G1m17,1 | G1m17,1 | PGDM1400 | Ck_ASE | Hinge_del | CH2_GAALIE | CH3_cah_LS_G1m17,1 |
| Ck(AS/Q124E) del216- | | | | | | |
| 220 GAALIE cah LS | | | | | | |
| PGDM1400 VH G1m17,1 | G1m17,1 | PGDM1400 | Ck_ASE | Hinge_del | CH2_GAIE | CH3_cah_LS_G1m17,1 |
| Ck(AS/Q124E) del216- | | | | | | |
| 220 GAIE cah LS | | | | | | |
| PGDM1400 VH G1m17,1 | G1m17,1 | PGDM1400 | Ck_ASE | Hinge_del | CH2_GA | CH3_cah_LS_G1m17,1 |
| Ck(AS/Q124E) del216- | | | | | | |
| 220 GA cah LS | | | | | | |
| PGDM1400 VH G1m17,1 | G1m17,1 | PGDM1400 | Ck_ASE | Hinge_del | CH2_IE | CH3_cah_LS_G1m17,1 |
| Ck(AS/Q124E) del216- | | | | | | |
| 220 IE cah LS | | | | | | |
| PGDM1400 VH G1m17,1 | G1m17,1 | PGDM1400 | Ck_ASE | Hinge_del | CH2 | CH3_cak_LS_G1m17,1 |
| Ck(AS/Q124E) del216- | | | | | | |
| 220 cak LS | | | | | | |
| PGDM1400 VH G1m17,1 | G1m17,1 | PGDM1400 | Ck_ASE | Hinge_del | CH2_GAALIE | CH3_cak_LS_G1m17,1 |
| Ck(AS/Q124E) del216- | | | | | | |
| 220 GAALIE cak LS | | | | | | |
| PGDM1400 VH G1m17,1 | G1m17,1 | PGDM1400 | Ck_ASE | Hinge_del | CH2_GAIE | CH3_cak_LS_G1m17,1 |
| Ck(AS/Q124E) del216- | | | | | | |
| 220 GAIE cak LS | | | | | | |
| PGDM1400 VH G1m17,1 | G1m17,1 | PGDM1400 | Ck_ASE | Hinge_del | CH2_GA | CH3_cak_LS_G1m17,1 |
| Ck(AS/Q124E) del216- | | | | | | |
| 220 GA cak LS | | | | | | |
| PGDM1400 VH G1m17,1 | G1m17,1 | PGDM1400 | Ck_ASE | Hinge_del | CH2_IE | CH3_cak_LS_G1m17,1 |
| Ck(AS/Q124E) del216- | | | | | | |
| 220 IE cak LS | | | | | | |

| CrossMabCH1-CLx | | | | | | |
|---|---|---|---|---|---|---|
| format Light Chain | Allotype | VL | CH1 | — | — | — |
| PGDM1400 VL CH1(SS) (G1m3) | G1m3 | PGDM1400 | CH1(SS) | — | — | — |
| | | | (G1m3) | | | |
| PGDM1400 VL CH1(SS) (G1m17±,1) | G1m17±,1 | PGDM1400 | CH1(SS) | — | — | — |
| | | | (G1m17±,1) | | | |

### C. CrossMab^{CH1-CLcv}

[0534] In some embodiments, antibody agents as described herein are in a format where one or more charge variants (cv) are introduced into a domain (e.g., a constant domain, e.g., a CH₁ domain, a CL domain, or a combination thereof). Such formats are referred to herein as “CrossMab^{CH1-CLcv}” or “CH₁-cv”. In some embodiments, such antibody agents include charge variants in both arms of the antibody (see e.g., FIG. 4, Panel D). Exemplary charge variants are described e.g., in WO2017055539 A1, which is herein incorporated by reference in its entirety. In some embodiments, in contrast to the formats described in WO2017055539 A1, CH₁-cv antibody agents described do not include a swap of the antibody CH₁ and CL domains in either arm of the antibody.

[0535] In some embodiments, a charge variant (cv) is introduced into a CH₁ and/or CL domain of an antibody agent in order to prevent mispairing of immunoglobulin chains of an antibody agent. Such charge variants may include, for example, introducing one or more positively charged amino acid residues in a CH₁ domain and one or more negatively charged amino acid residues in the CL, or vice versa, at specific positions in the CH₁ and CL interface.

[0536] In some embodiments, a polyribonucleotide may encode a heavy chain and/or light chain of a CrossMab^{CH1-CLcv} antibody agent as described herein.

[0537] In some embodiments, a CrossMab^{CH1-CLcv} antibody agent may be encoded by two separate polyribonucleotide: a first polyribonucleotide comprising a coding region that encodes (in 5′ to 3′ order): a heavy chain variable domain (VH), a CH₁ domain that includes one or more charge variants as described herein, a hinge region, a CH₂ domain, and a CH₃ domain (see e.g., FIG. 10, Panel A); and a second polyribonucleotide comprising a coding region that encodes (in 5′ to 3′ order): a light chain variable domain (VL) and a light chain constant domain (CL) that includes one or more charge variants as described herein (see e.g., FIG. 10, Panel B).

[0538] In some embodiments, a CrossMab^{CH1-CLcv} antibody agent comprises a first immunoglobulin chain, wherein the first immunoglobulin chain comprises a CL domain and the CL domain an amino acid at position 123 (EU numbering) that is substituted by an amino acid selected from K, R and H. In some embodiments, a CrossMab^{CH1-CLcv} antibody agent comprises a first immunoglobulin chain, wherein the first immunoglobulin chain comprises a CL domain and the CL domain an amino acid at position 124 (EU numbering) that is substituted by an amino acid selected from K, R and H. In some embodiments, a CrossMab^{CH1-CLcv} antibody agent comprises a second immunoglobulin chain, wherein the second immunoglobulin chain comprises a CH₁ domain having an amino acid at position 147 (EU numbering) that is substituted by an amino acid selected from E or D (see WO2017055539A1, which is herein incorporated by reference in its entirety).

[0539] In some embodiments, a CrossMab^{CH1-CLcv} antibody agent encoded by one or more polyribonucleotides as described herein comprises a CH₁ domain that comprises one or more charge variant mutations. In some embodiments, a CrossMab^{CH1-CLcv} antibody agent comprises a CH₁ domain, wherein the CH₁ domain comprises one or more substitutions including K147E, K213D, or a combination thereof. In some embodiments, a CrossMab^{CH1-CLcv} antibody agent comprises a CH₁ domain that has at least 90%, 91%, 92%, 93%, 94%, 95%, 96%, 97%, 98%, or 99% sequence identity to SEQ ID NO: 84 or 87. In some embodiments, a CrossMab^{CH1-CLcv} antibody agent comprises a CH₁ domain having an amino acid sequence according to SEQ ID NO: 84 or 87. In some embodiments, a CrossMab^{CH1-CLcv}, antibody agent comprises a CH₁ domain that comprises a G1m3 allotype. In some embodiments, a CrossMab^{CH1-CLcv} antibody agent comprises a CH₁ domain that comprises a G1m17 allotype.

[0540] In some embodiments, a CrossMab^{CH1-CLcv} antibody agent encoded by one or more polyribonucleotides as described herein comprises a heavy chain encoded by a nucleic acid sequence that has at least 80%, 85%, 90%, 91%, 92%, 93%, 94%, 95%, 96%, 97%, 98%, or 99% sequence identity to a sequence represented by SEQ ID NO: 362-457, or 1323-1324. In some embodiments, a CrossMab^{CH1-CLcv} antibody agent comprises a heavy chain encoded by a nucleic acid sequence represented by any one of SEQ ID NOs: 362-457, 1323-1324. In some embodiments, a CrossMab^{CH1-CLcv} antibody agent comprises a light chain encoded by a nucleic acid sequence that has at least at least 80%, 85%, 90%, 91%, 92%, 93%, 94%, 95%, 96%, 97%, 98%, or 99% sequence identity to SEQ ID NO: 848-849, 1326-1327, or 1353-1354. In some embodiments, a CrossMab^{CH1-CLcv} antibody agent comprises a light chain encoded by a nucleic acid sequence represented in SEQ ID NO: 848-849, 1326-1327, or 1353-1354.

[0541] In some embodiments, a CrossMab^{CH1-CLcv} antibody agent encoded by one or more polyribonucleotides as described herein comprises a heavy chain comprising an amino acid sequence that has at least 80%, 85%, 90%, 91%, 92%, 93%, 94%, 95%, 96%, 97%, 98%, or 99% sequence identity to a sequence represented by SEQ ID NO: 1325. In some embodiments, a CrossMab^{CH1-CLcv} antibody agent comprises a heavy chain comprising an amino acid sequence represented by SEQ ID NOs: 1325. In some embodiments, a CrossMab^{CH1-CLcv} antibody agent comprises a light chain comprising an amino acid sequence that has at least at least 80%, 85%, 90%, 91%, 92%, 93%, 94%, 95%, 96%, 97%, 98%, or 99% sequence identity to SEQ ID NO: 1328 or 1355. In some embodiments, a CrossMab^{CH1-CLcv} antibody agent comprises a light chain encoded by a nucleic acid sequence represented in SEQ ID NO: 1328 or 1355.

[0542] In some embodiments, a CrossMab^{CH1-CLcv} antibody agent encoded by one or more polyribonucleotides provided herein includes all or part of a PGDM1400 antibody. In some embodiments, a CrossMab^{CH1-CLcv} antibody agent comprises a heavy chain variable domain comprising: (i) HCDR1 (SEQ ID NO: 18); (ii) HCDR2 (SEQ ID NO: 21); (iii) HCDR3 (SEQ ID NO: 24); or (iv) a combination thereof. In some embodiments, a CrossMab^{CH1-CLcv} antibody agent comprises a heavy chain variable domain comprising: (i) HCDR1 (SEQ ID NO: 18); (ii) HCDR2 (SEQ ID NO: 21); and (iii) HCDR3 (SEQ ID NO: 24). In some embodiments, a CrossMab^{CH1-CLcv} antibody agent comprises a light chain variable domain comprising: (i) LCDR1 (SEQ ID NO: 27); (ii) LCDR2 (LAS; SEQ ID NO: 30); (iii) LCDR3 (SEQ ID NO: 33); or (iv) a combination thereof. In some embodiments, a CrossMab^{CH1-CLcv} antibody agent comprises a light chain variable domain comprising: (i) LCDR1 (SEQ ID NO: 27); (ii) LCDR2 (LAS; SEQ ID NO: 30); and (iii) LCDR3 (SEQ ID NO: 33). In some embodiments, a CrossMab^{CH1-CLcv} antibody agent comprises (a) a heavy chain variable domain comprising: (i) HCDR1 (SEQ ID NO: 18); (ii) HCDR2 (SEQ ID NO: 21); (iii) HCDR3 (SEQ ID NO: 24); or (iv) a combination thereof; and (b) a light chain variable domain comprising: (i) LCDR1 (SEQ ID NO: 27); (ii) LCDR2 (LAS; SEQ ID NO: 30); (iii) LCDR3 (SEQ ID NO: 33); or (iv) a combination thereof. In some embodiments, a CrossMab^{CH1-CLcv} antibody agent comprises (a) a heavy chain variable domain comprising: (i) HCDR1 (SEQ ID NO: 18); (ii) HCDR2 (SEQ ID NO: 21); and (iii) HCDR3 (SEQ ID NO: 24) and (b) a light chain variable domain comprising: (i) LCDR1 (SEQ ID NO: 27); (ii) LCDR2 (LAS; SEQ ID NO: 30); and (iii) LCDR3 (SEQ ID NO: 33).

[0543] In some embodiments, a polyribonucleotide described herein encodes an immunoglobulin chain of a CrossMab^{CH1-CLcv} antibody agent, wherein the immunoglobulin chain comprises a heavy chain variable domain, and wherein the heavy chain variable domain comprises: (i) HCDR1 (SEQ ID NO: 18); (ii) HCDR2 (SEQ ID NO: 21); (iii) HCDR3 (SEQ ID NO: 24); or (iv) a combination thereof. In some embodiments, a polyribonucleotide described herein encodes an immunoglobulin chain of a CrossMab^{CH1-CLcv} antibody agent, wherein the immunoglobulin chain comprises a heavy chain variable domain, and wherein the heavy chain variable domain comprises: (i) HCDR1 (SEQ ID NO: 18); (ii) HCDR2 (SEQ ID NO: 21); and (iii) HCDR3 (SEQ ID NO: 24). In some embodiments, a polyribonucleotide described herein encodes an immunoglobulin chain of a CrossMab^{CH1-CLcv} antibody agent, wherein the immunoglobulin chain comprises a light chain variable domain, and wherein the light chain variable domain comprises: (i) LCDR1 (SEQ ID NO: 27); (ii) LCDR2 (LAS; SEQ ID NO: 30); (iii) LCDR3 (SEQ ID NO: 33); or (iv) a combination thereof. In some embodiments, a polyribonucleotide described herein encodes an immunoglobulin chain of a CrossMab^{CH1-CLcv} antibody agent, wherein the immunoglobulin chain comprises a light chain variable domain, and wherein the light chain variable domain comprises: (i) LCDR1 (SEQ ID NO: 27); (ii) LCDR2 (LAS; SEQ ID NO: 30); and (iii) LCDR3 (SEQ ID NO: 33). In some embodiments, a polyribonucleotide described herein encodes two immunoglobulin chains of a CrossMab^{CH1-CLcv} antibody agent: a first immunoglobulin chain comprising a heavy chain variable domain, wherein the heavy chain variable domain comprises: (i) HCDR1 (SEQ ID NO: 18); (ii) HCDR2 (SEQ ID NO: 21); (iii) HCDR3 (SEQ ID NO: 24); or (iv) a combination thereof; and a second immunoglobulin chain comprising a light chain variable domain, wherein the light chain variable domain comprises: (i) LCDR1 (SEQ ID NO: 27); (ii) LCDR2 (LAS; SEQ ID NO: 30); (iii) LCDR3 (SEQ ID NO: 33); or (iv) a combination thereof. In some embodiments, a polyribonucleotide described herein encodes two immunoglobulin chains of a CrossMab^{CH1-CLcv} antibody agent: a first immunoglobulin chain comprising a heavy chain variable domain, wherein the heavy chain variable domain comprises: (i) HCDR1 (SEQ ID NO: 18); (ii) HCDR2 (SEQ ID NO: 21); and (iii) HCDR3 (SEQ ID NO: 24); and a second immunoglobulin chain comprising a light chain variable domain, wherein the light chain variable domain comprises: (i) LCDR1 (SEQ ID NO: 27); (ii) LCDR2 (LAS; SEQ ID NO: 30); and (iii) LCDR3 (SEQ ID NO: 33).

[0544] In some embodiments, a CrossMab^{CH1-CLcv} antibody agent comprises a heavy chain variable domain having at least 80%, 85%, 90%, 91%, 92%, 93%, 94%, 95%, 96%, 97%, 98%, or 99% sequence identity to an amino acid sequence represented by SEQ ID NO: 36. In some embodiments, a CrossMab^{CH1-CLcv} antibody agent comprises a light chain variable domain having at least 80%, 85%, 90%, 91%, 92%, 93%, 94%, 95%, 96%, 97%, 98%, or 99% identity to an amino acid sequence represented by SEQ ID NO: 43. In some embodiments, a CrossMab^{CH1-CLcv} antibody agent comprises a heavy chain variable domain represented by SEQ ID NO: 36. In some embodiments, a CrossMab^{CH1-CLcv} antibody agent comprises a light chain variable domain represented by SEQ ID NO: 43.

[0545] In some embodiments, a CrossMab^{CH1-CLcv} antibody agent comprises a heavy chain variable domain having at least 80%, 85%, 90%, 91%, 92%, 93%, 94%, 95%, 96%, 97%, 98%, or 99% sequence identity to an amino acid sequence represented by SEQ ID NO: 1494. In some embodiments, a CrossMab^{CH1-CLcv} antibody agent comprises a light chain variable domain having at least 80%, 85%, 90%, 91%, 92%, 93%, 94%, 95%, 96%, 97%, 98%, or 99% identity to an amino acid sequence represented by SEQ ID NO: 43. In some embodiments, a CrossMab^{CH1-CLcv} antibody agent comprises a heavy chain variable domain represented by SEQ ID NO: 1494. In some embodiments, a CrossMab^{CH1-CLcv} antibody agent comprises a light chain variable domain represented by SEQ ID NO: 43.

[0546] In some embodiments, an antibody agent (e.g., a PGDM1400 antibody agent) encoded by one or more polyribonucleotides provided herein comprises a heavy chain variable domain that comprises one or more mutations relative to an amino acid sequence represented by SEQ ID NO: 1494. In some embodiments, substitution mutations are present at residues 3 and/or 5 relative to SEQ ID NO: 1494. In some embodiments, a substitution mutation at residue 3 results in a positively charged amino acid being present at residue 3 relative to SEQ ID NO: 1494. Positively charged amino acids include Lys (K), Arg (R), and His (H). In some embodiments, a substitution mutation at residue 3 relative to SEQ ID NO: 1494 comprises Q3H. In some embodiments, a substitution mutation at residue 5 results in a polar amino acid being present at residue 5 relative to SEQ ID NO: 1494. Polar amino acids include Ser (S), Thr (T), Tyr (Y), Asn (N), and Gln (Q). In some embodiments, a substitution mutation at residue 5 relative to SEQ ID NO: 1494 comprises V5T.

[0547] In some embodiments, an antibody agent (e.g., a PGDM1400 antibody agent) encoded by one or more polyribonucleotides provided herein comprises a heavy chain variable domain that comprises SEQ ID NO: 1494 with substitution mutations Q3H and V5T.

[0548] In some embodiments, a polyribonucleotide described herein encodes an immunoglobulin chain of a CrossMab^{CH1-CLcv} antibody agent, wherein the immunoglobulin chain comprises a heavy chain variable domain having at least 80%, 85%, 90%, 91%, 92%, 93%, 94%, 95%, 96%, 97%, 98%, or 99% sequence identity to an amino acid sequence represented by SEQ ID NO: 36. In some embodiments, a polyribonucleotide described herein encodes an immunoglobulin chain of a CrossMab^{CH1-CLcv} antibody agent, wherein the immunoglobulin chain comprises a light chain variable domain having at least 80%, 85%, 90%, 91%, 92%, 93%, 94%, 95%, 96%, 97%, 98%, or 99% identity to an amino acid sequence represented by SEQ ID NO: 43. In some embodiments, a polyribonucleotide described herein encodes an immunoglobulin chain of a CrossMab^{CH1-CLcv} antibody agent, wherein the immunoglobulin chain comprises a heavy chain variable domain represented by SEQ ID NO: 36. In some embodiments, a polyribonucleotide described herein encodes an immunoglobulin chain of a CrossMab^{CH1-CLcv} antibody agent, wherein the immunoglobulin chain comprises a light chain variable domain represented by SEQ ID NO: 43.

[0549] As described above, CrossMab^{CH1-CLcv} antibody agents encoded by one or more polyribonucleotides as described herein may comprise one or more heavy chain constant domains. In some embodiments, one or more heavy chain constant domains comprise a CH₃ domain. In some embodiments, a CrossMab^{CH1-CLcv} antibody agent comprises a CH₃ domain that comprises a G1m3, G1m17, or a G1m17,1 allotype. In some embodiments, a CrossMab^{CH1-CLcv} antibody agent comprises a CH₃ domain that comprises an amino acid sequence at least 90%, 91%, 92%, 93%, 94%, 95%, 96%, 97%, 98%, or 99% identical to a sequence represented by represented in any one of SEQ ID NOs: 113, 116, 119, 122, 125, 128, 131, 134, 137, 140, 143, 146, or 1495. In some embodiments, a CrossMab^{CH1-CLcv} antibody agent comprises a CH₃ domain that comprises an amino acid sequence represented in any one of SEQ ID NOs: 113, 116, 119, 122, 125, 128, 131, 134, 137, 140, 143, 146, 1495. In some embodiments, a CH₃ domain comprises amino acid sequence SEQ ID NO: 1495 with substitution mutations D16E and L18M.

[0550] CrossMab^{CH1-CLcv} antibody agents encoded by one or more polyribonucleotides as described herein may comprise one or more heavy chain constant domains comprising an amino acid modification (e.g., a substitution or deletion) at one or more amino acid positions. In some embodiments, a CrossMab^{CH1-CLcv} antibody agent as described herein may include the L/S mutation within the CH₃ region (for enhanced FcRn binding) (see Zalevsky J et al., Nat Biotechnol. 2010, which is herein incorporated by reference). Such mutations are noted as M428L and N434S according to EU numbering (i.e., M88L and N94S within the CH₃ domain, e.g., SEQ ID NO: 113, 116, or 1495), and referred to herein as “LS” or “L/S”. In some embodiments, a CrossMab^{CH1-CLcv} antibody agent comprises an E294 deletion (for Fc hypersialylation) (see Bas M et al., J Immunol 2019, which is herein incorporated by reference).

[0551] In some embodiments, a CrossMab^{CH1-CLcv} antibody agent encoded by one or more polyribonucleotides comprises a CH₃ domain comprising one or more of the following mutations: Y349C, T366S, L368A, and Y407V (according to EU numbering). Such a combination of mutations is referred to herein as “cah”. In some embodiments, a CH₁-cv antibody agent comprises a CH₃ domain comprising one or more mutations selected from: S354C and T366W (according to EU numbering). Such a combination of CH₃ mutations is referred to herein as “cak”.

[0552] In some embodiments, a CrossMab^{CH1-CLcv} antibody agent encoded by one or more polyribonucleotides comprises a hinge domain that comprises an amino acid sequence represented in SEQ ID NO: 161.

[0553] In some embodiments, a CrossMab^{CH1-CLcv} antibody agent encoded by one or more polyribonucleotides comprises a CH₂ domain that comprises an amino acid sequence at least 90%, 91%, 92%, 93%, 94%, 95%, 96%, 97%, 98%, or 99% identical to represented in SEQ ID NO: 96. In some embodiments, a CH₁-cv antibody agent comprises a CH₂ domain that comprises an amino acid sequence represented in SEQ ID NO: 53. In some embodiments, a CrossMab^{CH1-CLcv} antibody agent comprises a CH₂ domain that comprises one or more mutations (e.g., with respect to SEQ ID NO: 96). For example, in some embodiments, a CrossMab^{CH1-CLcv} antibody agent comprises one or more of the following mutations: G236A, A330L, and I332E (according to EU numbering). Such a combination of mutations is referred to herein as “GAALIE”. Such mutations in the CH₂ domain have been associated with increased affinity to Fc receptors FcgRIIA and FcgRIII for enhanced antibody effector function. In some embodiments, a CrossMab^{CH1-CLcv} antibody agent comprises a CH₂ domain that comprises an amino acid sequence that is at least 90%, 91%, 92%, 93%, 94%, 95%, 96%, 97%, 98%, or 99% identical to SEQ ID NO: 99 or 102. In some embodiments, a CrossMab^{CH1-CLcv} antibody agent comprises a CH₂ domain that comprises an amino acid sequence represented in SEQ ID NO: 99 or 102. In some embodiments, a CrossMab^{CH1-CLcv} antibody agent comprises a CH₂ domain with one or more mutations selected from: G236A and I332E (according to EU numbering). Such a combination of CH₂ mutations is referred to herein as “GAIE”. In some embodiments, a CrossMab^{CH1-CLcv} antibody agent comprises a CH₂ domain that comprises an amino acid sequence at least 90%, 91%, 92%, 93%, 94%, 95%, 96%, 97%, 98%, or 99% identical to SEQ ID NO: 104. In some embodiments, a CrossMab^{CH1-CLcv} antibody agent comprises a CH₂ domain that comprises an amino acid sequence represented in SEQ ID NO: 104. In some embodiments, a CrossMab^{CH1-CLcv} antibody agent comprises a mutation: G236A (according to EU numbering), referred to herein as “GA”. In some embodiments, a CrossMab^{CH1-CLcv} antibody agent comprises a CH₂ domain that comprises an amino acid sequence at least 90%, 91%, 92%, 93%, 94%, 95%, 96%, 97%, 98%, or 99% identical to SEQ ID NO: 107. In some embodiments, a CrossMab^{CH1-CLcv} antibody agent comprises a CH₂ domain that comprises an amino acid sequence represented in SEQ ID NO: 107. In some embodiments, a CrossMab^{CH1-CLcv} antibody agent comprises a mutation: I332E (according to EU numbering), referred to herein as “IE”. In some embodiments, a CH₁-cv antibody agent comprises a CH₂ domain that comprises an amino acid sequence at least 90%, 91%, 92%, 93%, 94%, 95%, 96%, 97%, 98%, or 99% identical to SEQ ID NO: 110. In some embodiments, a CrossMab^{CH1-CLcv} antibody agent comprises a CH₂ domain that comprises an amino acid sequence represented in SEQ ID NO: 110.

[0554] In some embodiments, a CrossMab^{CH1-CLcv} antibody agent encoded by one or more polyribonucleotides comprises a signal peptide comprising a husec2 signal peptide. In some embodiments, a CrossMab^{CH1-CLcv} antibody agent comprises a signal peptide comprising SEQ ID NO: 1.

[0555] In some embodiments, a CrossMab^{CH1-CLcv} antibody agent encoded by one or more polyribonucleotides comprises a light chain constant domain that comprises a kappa light chain constant domain. In some embodiments, a CrossMab^{CH1-CLcv} antibody agent comprises a kappa light chain constant domain comprising one or more charge variant mutations. In some embodiments, a CrossMab^{CH1-CLcv} antibody agent comprises one or more charge variants selected from the mutations: a E123K and Q124R (i.e., mutations that impart a positive charge). In some embodiments, a CrossMab^{CH1-CLcv} antibody agent comprises one or more charge variants selected from the mutations: a E123R and Q124K (i.e., mutations that impart a positive charge). Such mutations, when paired with a CH₁ domain with mutations that impart a negative charge (e.g., K147E and/or K213D) in the CH₁ and CL interface, prevent mispairing between the antibody variable domains of an antibody agent. In some embodiments, a CrossMab^{CH1-CLcv} antibody comprises a kappa light chain constant domain comprising an amino acid sequence at least 80, 85, 90%, 91%, 92%, 93%, 94%, 95%, 96%, 97%, 98%, or 99% identical to SEQ ID NO: 155 or 158. In some embodiments, a CrossMab^{CH1-CLcv} antibody comprises a kappa light chain constant domain comprising an amino acid sequence represented in SEQ ID NO: 155 or 158. In some embodiments, a CrossMab^{CH1-CLcv} antibody agent comprises a lambda light chain constant domain.

[0556] In some embodiments, an antibody agent described herein may be a combination of a CrossMab^{CH1-CLx} and CrossMab^{CH1-CLcv} antibody agent. For example, an antibody agent described herein can include one arm of the antibody that is in a CrossMab^{CH1-CLx} format and a second arm of the antibody in a CrossMab^{CH1-CLv} format.

[0557] In some embodiments, antibody agents described herein can be designed to include one or more mutations to utilize KIH technology. For example, in some embodiments, a CrossMab^{CH1-CLx} antibody agent as described herein can be designed to further include mutations to utilize KIH technology. In some embodiments, a CrossMab^{CH1-CLx} antibody agent as described herein can be designed to further include mutations to utilize KIH technology. In some embodiments, KIH technology may be applied to promote pairing of two different heavy chains, for example, to produce a bispecific and/or bivalent antibody agent. In some embodiments, KIH technology may be applied to promote pairing of two different heavy chains, for example, to produce a bispecific and/or bivalent antibody comprising one arm of the antibody that comprises an immunoglobulin chain of a CrossMab^{CH1-CLx} antibody agent and a second arm that comprises an immunoglobulin chain of a CrossMab^{CH1-cv} antibody agent.

[0558] In some embodiments, a polyribonucleotide encoding a CrossMab^{CH1-CLcv} antibody agent comprises a ribonucleic acid sequence that encodes any one of the immunoglobulin heavy chain configurations in Table 5, corresponding to SEQ ID NOs: 362-457, and 1323-1324. In some embodiments, a polyribonucleotide encoding a CrossMab^{CH1-CLcv} antibody comprises a ribonucleic acid sequence that encodes any one of the immunoglobulin light chain configurations in Table 5, corresponding to SEQ ID NOs: 848-849, 1326-1327, and 1353-1354.

[0559] Exemplary heavy chain and light chain configurations of a CrossMab^{CH1-CLcv} antibody agent, as described herein, are shown in Table 5 below.

TABLE 5
CrossMab^{CH1-CLcv} Exemplary Chain Configurations

| CrossMab^{CH1-CLcv} | | | | | | |
|---|---|---|---|---|---|---|
| Heavy Chain Formats | Allotype | VH | CH1 | Hinge | CH2 | CH3 |
| PGDM1400 VH G1m3 | G1m3 | PGDM1400 | CH1_ED_G1m3 | Hinge | CH2 | CH3_G1m3/17 |
| K147E + K213D | | | | | | |
| PGDM1400 VH G1m3 | G1m3 | PGDM1400 | CH1_ED_G1m3 | Hinge | CH2 | CH3_LS_G1m3/17 |
| K147E + K213D LS | | | | | | |
| PGDM1400 VH G1m3 | G1m3 | PGDM1400 | CH1_ED_G1m3 | Hinge | CH2_GAALIE | CH3_LS_G1m3/17 |
| K147E + K213D | | | | | | |
| GAALIE LS | | | | | | |
| PGDM1400 VH G1m3 | G1m3 | PGDM1400 | CH1_ED_G1m3 | Hinge | CH2_GAIE | CH3_LS_G1m3/17 |
| K147E + K213D GAIE | | | | | | |
| LS | | | | | | |
| PGDM1400 VH G1m3 | G1m3 | PGDM1400 | CH1_ED_G1m3 | Hinge | CH2_GA | CH3_LS_G1m3/17 |
| K147E + K213D GA LS | | | | | | |
| PGDM1400 VH G1m3 | G1m3 | PGDM1400 | CH1_ED_G1m3 | Hinge | CH2_IE | CH3_LS_G1m3/17 |
| K147E + K213D IE LS | | | | | | |
| PGDM1400 VH G1m3 | G1m3 | PGDM1400 | CH1_ED_G1m3 | Hinge | CH2 | CH3_cah_LS_G1m3/17 |
| K147E + K213D cah | | | | | | |
| LS | | | | | | |
| PGDM1400 VH G1m3 | G1m3 | PGDM1400 | CH1_ED_G1m3 | Hinge | CH2_GAALIE | CH3_cah_LS_G1m3/17 |
| K147E + K213D | | | | | | |
| GAALIE cah LS | | | | | | |
| PGDM1400 VH G1m3 | G1m3 | PGDM1400 | CH1_ED_G1m3 | Hinge | CH2_GAIE | CH3_cah_LS_G1m3/17 |
| K147E + K213D GAIE | | | | | | |
| cah LS | | | | | | |
| PGDM1400 VH G1m3 | G1m3 | PGDM1400 | CH1_ED_G1m3 | Hinge | CH2_GA | CH3_cah_LS_G1m3/17 |
| K147E + K213D GA cah | | | | | | |
| LS | | | | | | |
| PGDM1400 VH G1m3 | G1m3 | PGDM1400 | CH1_ED_G1m3 | Hinge | CH2_IE | CH3_cah_LS_G1m3/17 |
| K147E + K213D IE cah | | | | | | |
| LS | | | | | | |
| PGDM1400 VH G1m3 | G1m3 | PGDM1400 | CH1_ED_G1m3 | Hinge | CH2 | CH3_cak_LS_G1m3/17 |
| K147E + K213D cak LS | | | | | | |
| PGDM1400 VH G1m3 | G1m3 | PGDM1400 | CH1_ED_G1m3 | Hinge | CH2_GAALIE | CH3_cak_LS_G1m3/17 |
| K147E + K213D | | | | | | |
| GAALIE cak LS | | | | | | |
| PGDM1400 VH G1m3 | G1m3 | PGDM1400 | CH1_ED_G1m3 | Hinge | CH2_GAIE | CH3_cak_LS_G1m3/17 |
| K147E + K213D GAIE | | | | | | |
| cak LS | | | | | | |
| PGDM1400 VH G1m3 | G1m3 | PGDM1400 | CH1_ED_G1m3 | Hinge | CH2_GA | CH3_cak_LS_G1m3/17 |
| K147E + K213D GA cak | | | | | | |
| LS | | | | | | |
| PGDM1400 VH G1m3 | G1m3 | PGDM1400 | CH1_ED_G1m3 | Hinge | CH2_IE | CH3_cak_LS_G1m3/17 |
| K147E + K213D IE cak | | | | | | |
| LS | | | | | | |
| PGDM1400 VH G1m17 | G1m17 | PGDM1400 | CH1_ED_G1m17 | Hinge | CH2 | CH3_G1m3/17 |
| K147E + K213D | | | | | | |
| PGDM1400 VH G1m17 | G1m17 | PGDM1400 | CH1_ED_G1m17 | Hinge | CH2 | CH3_LS_G1m3/17 |
| K147E + K213D LS | | | | | | |
| PGDM1400 VH G1m17 | G1m17 | PGDM1400 | CH1_ED_G1m17 | Hinge | CH2_GAALIE | CH3_LS_G1m3/17 |
| K147E + K213D | | | | | | |
| GAALIE LS | | | | | | |
| PGDM1400 VH G1m17 | G1m17 | PGDM1400 | CH1_ED_G1m17 | Hinge | CH2_GAIE | CH3_LS_G1m3/17 |
| K147E + K213D GAIE | | | | | | |
| LS | | | | | | |
| PGDM1400 VH G1m17 | G1m17 | PGDM1400 | CH1_ED_G1m17 | Hinge | CH2_GA | CH3_LS_G1m3/17 |
| K147E + K213D GA LS | | | | | | |
| PGDM1400 VH G1m17 | G1m17 | PGDM1400 | CH1_ED_G1m17 | Hinge | CH2_IE | CH3_LS_G1m3/17 |
| K147E + K213D IE LS | | | | | | |
| PGDM1400 VH G1m17 | G1m17 | PGDM1400 | CH1_ED_G1m17 | Hinge | CH2 | CH3_cah_LS_G1m3/17 |
| K147E + K213D cah | | | | | | |
| LS | | | | | | |
| PGDM1400 VH G1m17 | G1m17 | PGDM1400 | CH1_ED_G1m17 | Hinge | CH2_GAALIE | CH3_cah_LS_G1m3/17 |
| K147E + K213D | | | | | | |
| GAALIE cah LS | | | | | | |
| PGDM1400 VH G1m17 | G1m17 | PGDM1400 | CH1_ED_G1m17 | Hinge | CH2_GAIE | CH3_cah_LS_G1m3/17 |
| K147E + K213D GAIE | | | | | | |
| cah LS | | | | | | |
| PGDM1400 VH G1m17 | G1m17 | PGDM1400 | CH1_ED_G1m17 | Hinge | CH2_GA | CH3_cah_LS_G1m3/17 |
| K147E + K213D GA cah | | | | | | |
| LS | | | | | | |
| PGDM1400 VH G1m17 | G1m17 | PGDM1400 | CH1_ED_G1m17 | Hinge | CH2_IE | CH3_cah_LS_G1m3/17 |
| K147E + K213D IE cah | | | | | | |
| LS | | | | | | |
| PGDM1400 VH G1m17 | G1m17 | PGDM1400 | CH1_ED_G1m17 | Hinge | CH2 | CH3_cak_LS_G1m3/17 |
| K147E + K213D cak LS | | | | | | |
| PGDM1400 VH G1m17 | G1m17 | PGDM1400 | CH1_ED_G1m17 | Hinge | CH2_GAALIE | CH3_cak_LS_G1m3/17 |
| K147E + K213D | | | | | | |
| GAALIE cak LS | | | | | | |
| PGDM1400 VH G1m17 | G1m17 | PGDM1400 | CH1_ED_G1m17 | Hinge | CH2_GAIE | CH3_cak_LS_G1m3/17 |
| K147E + K213D GAIE | | | | | | |
| cak LS | | | | | | |
| PGDM1400 VH G1m17 | G1m17 | PGDM1400 | CH1_ED_G1m17 | Hinge | CH2_GA | CH3_cak_LS_G1m3/17 |
| K147E + K213D GA cak | | | | | | |
| LS | | | | | | |
| PGDM1400 VH G1m17 | G1m17 | PGDM1400 | CH1_ED_G1m17 | Hinge | CH2_IE | CH3_cak_LS_G1m3/17 |
| K147E + K213D IE cak | | | | | | |
| LS | | | | | | |
| PGDM1400 VH G1m17,1 | G1m17,1 | PGDM1400 | CH1_ED_G1m17 | Hinge | CH2 | CH3_G1m17,1 |
| K147E + K213D | | | | | | |
| PGDM1400 VH G1m17,1 | G1m17,1 | PGDM1400 | CH1_ED_G1m17 | Hinge | CH2 | CH3_LS_G1m17,1 |
| K147E + K213D LS | | | | | | |
| PGDM1400 VH G1m17,1 | G1m17,1 | PGDM1400 | CH1_ED_G1m17 | Hinge | CH2_GAALIE | CH3_LS_G1m17,1 |
| K147E + K213D | | | | | | |
| GAALIE LS | | | | | | |
| PGDM1400 VH G1m17,1 | G1m17,1 | PGDM1400 | CH1_ED_G1m17 | Hinge | CH2_GAIE | CH3_LS_G1m17,1 |
| K147E + K213D GAIE | | | | | | |
| LS | | | | | | |
| PGDM1400 VH G1m17,1 | G1m17,1 | PGDM1400 | CH1_ED_G1m17 | Hinge | CH2_GA | CH3_LS_G1m17,1 |
| K147E + K213D GA LS | | | | | | |
| PGDM1400 VH G1m17,1 | G1m17,1 | PGDM1400 | CH1_ED_G1m17 | Hinge | CH2_IE | CH3_LS_G1m17,1 |
| K147E + K213D IE LS | | | | | | |
| PGDM1400 VH G1m17,1 | G1m17,1 | PGDM1400 | CH1_ED_G1m17 | Hinge | CH2 | CH3_cah_LS_G1m17,1 |
| K147E + K213D cah | | | | | | |
| LS | | | | | | |
| PGDM1400 VH G1m17,1 | G1m17,1 | PGDM1400 | CH1_ED_G1m17 | Hinge | CH2_GAALIE | CH3_cah_LS_G1m17,1 |
| K147E + K213D | | | | | | |
| GAALIE cah LS | | | | | | |
| PGDM1400 VH G1m17,1 | G1m17,1 | PGDM1400 | CH1_ED_G1m17 | Hinge | CH2_GAIE | CH3_cah_LS_G1m17,1 |
| K147E + K213D GAIE | | | | | | |
| cah LS | | | | | | |
| PGDM1400 VH G1m17,1 | G1m17,1 | PGDM1400 | CH1_ED_G1m17 | Hinge | CH2_GA | CH3_cah_LS_G1m17,1 |
| K147E + K213D GA cah | | | | | | |
| LS | | | | | | |
| PGDM1400 VH G1m17,1 | G1m17,1 | PGDM1400 | CH1_ED_G1m17 | Hinge | CH2_IE | CH3_cah_LS_G1m17,1 |
| K147E + K213D IE cah | | | | | | |
| LS | | | | | | |
| PGDM1400 VH G1m17,1 | G1m17,1 | PGDM1400 | CH1_ED_G1m17 | Hinge | CH2 | CH3_cak_LS_G1m17,1 |
| K147E + K213D cak LS | | | | | | |
| PGDM1400 VH G1m17,1 | G1m17,1 | PGDM1400 | CH1_ED_G1m17 | Hinge | CH2_GAALIE | CH3_cak_LS_G1m17,1 |
| K147E + K213D | | | | | | |
| GAALIE cak LS | | | | | | |
| PGDM1400 VH G1m17,1 | G1m17,1 | PGDM1400 | CH1_ED_G1m17 | Hinge | CH2_GAIE | CH3_cak_LS_G1m17,1 |
| K147E + K213D GAIE | | | | | | |
| cak LS | | | | | | |
| PGDM1400 VH G1m17,1 | G1m17,1 | PGDM1400 | CH1_ED_G1m17 | Hinge | CH2_GA | CH3_cak_LS_G1m17,1 |
| K147E + K213D GA cak | | | | | | |
| LS | | | | | | |
| PGDM1400 VH G1m17,1 | G1m17,1 | PGDM1400 | CH1_ED_G1m17 | Hinge | CH2_IE | CH3_cak_LS_G1m17,1 |
| K147E + K213D IE cak | | | | | | |
| LS | | | | | | |

| CrossMab^{CH1-cv} | | | | | | |
|---|---|---|---|---|---|---|
| format Light Chain | Allotype | VL | CL | — | — | — |
| PGDM1400 VL E123K + Q124R | — | PGDM1400 | E123K + Q124R | — | — | — |
| PGDM1400 VL E123R + Q124K | — | PGDM1400 | E123K + Q124R | — | — | — |

D. scFv-Fc

[0560] In some embodiments, an antibody agent described herein (e.g., an HIV antibody agent) is in a single-chain Fv (sFv or scFv) format. A scFv is an antibody fragment that comprises the V_{H} and V_{L} antibody domains connected into a single polypeptide chain. An scFv polypeptide can further comprise a polypeptide linker that connects the V_{H} and V_{L} domains that enable the scFv to form the desired structure for antigen binding (see, e.g., FIG. 4, Panel E, and Pluckthun, The Pharmacology of Monoclonal Antibodies, vol. 113; Rosenburg and Moore eds., Springer-Verlag, New York, pp. 269-315 (1994); each of which is herein incorporated by reference).

[0561] Antibody agents as described herein in scFv format can be part of a fusion that includes a scFv domain fused to an Fc domain of an antibody (see e.g., FIG. 4, Panel C, herein referred to as “scFv-Fc” or “scFv-Fc fusion”). Such a format presents certain advantages over other antibody formats in that mispairing of the heavy chain and light chain of the antibody is avoided.

[0562] An scFv-Fc fusion antibody agent may be encoded by a single polyribonucleotide comprising a first coding region that encodes a single-chain variable fragment (scFv) that preferentially binds to an epitope of HIV and a Fc domain (e.g., hIgG1). In some embodiments, a polyribonucleotide encodes a scFv in 5′ to 3′ order: heavy chain variable region (VH), linker (e.g., (G4S)₄ (“LL4”) or (G4S)₅ (“LL5”)) and a light chain variable region (VL) (see e.g., FIG. 8, Panel A). In some embodiments, a polyribonucleotide encodes a scFv in 5′ to 3′ order: VL, linker (e.g., (GGGGS)₄ (“LL4”) or (GGGGS)₅(“LL5”)), VH (see e.g., FIG. 8, Panel B).

[0563] In some embodiments, a polyribonucleotide may encode a scFv-Fc antibody agent as described herein. In some embodiments, a polyribonucleotide encoding a scFv-Fc antibody heavy chain comprises a ribonucleic acid sequence encoding a VH domain, a hinge domain, a CH₂ domain, and a CH₃ domain.

[0564] Linkers included in scFv formats described herein may include a flexible linker. In some embodiments, a flexible linker contains at least 1 flexible amino acid (e.g., Gly). Exemplary flexible linkers include glycine polymers (G)ₙ, glycine-serine polymers (including, for example, (GS)ₙ, (GSGGS)ₙ (SEQ ID NO: 1481) and (GGGGS)ₙ (SEQ ID NO: 1482), where n is an integer of at least one), glycine-alanine polymers, alanine-serine polymers, and other flexible linkers known in the art. Glycine and glycine-serine polymers are relatively unstructured, and therefore may be able to serve as a neutral tether between components. Glycine accesses significantly more phi-psi space than even alanine, and is much less restricted than residues with longer side chains (see Scheraga, Rev. Computational Chem. 11:173-142 (1992), which is herein incorporated by reference). Exemplary flexible linkers to be used in scFv formats described herein include, but are not limited to:

(SEQ ID NO: 48)
GGGGSGGGGSGGGGSGGGGS
(SEQ ID NO: 59)
GGGGSGGGGSGGGGSGGGGSGGGGS

[0565] Linkers utilized in scFv formats as described herein can be readily selected and can be of various lengths, such as from 1 amino acid (e.g., Gly) to 20 amino acids, from 2 amino acids to 15 amino acids, from 3 amino acids to 12 amino acids, including 4 amino acids to 10 amino acids, 5 amino acids to 9 amino acids, 6 amino acids to 8 amino acids, or 7 amino acids to 8 amino acids (e.g., at least 1, 2, 3, 4, 5, 6, 7, 8, 9, 10, 11, 12, 13, 14, 15, 16, 17, 18, or 19 amino acids).

[0566] In some embodiments, an scFv-Fc encoded by one or more polyribonucleotides described herein includes all or part of a PGDM1400 antibody. In some embodiments, an scFv-Fc encoded by one or more polyribonucleotides provided herein includes all or part of a PGDM1400 antibody. In some embodiments, an scFv-Fc comprises a heavy chain variable domain comprising: (i) HCDR1 (SEQ ID NO: 18); (ii) HCDR2 (SEQ ID NO: 21); (iii) HCDR3 (SEQ ID NO: 24); or (iv) a combination thereof. In some embodiments, an scFv-Fc comprises a heavy chain variable domain comprising: (i) HCDR1 (SEQ ID NO: 18); (ii) HCDR2 (SEQ ID NO: 21); and (iii) HCDR3 (SEQ ID NO: 24). In some embodiments, an scFv-Fc comprises a light chain variable domain comprising: (i) LCDR1 (SEQ ID NO: 27); (ii) LCDR2 (LAS; SEQ ID NO: 30); (iii) LCDR3 (SEQ ID NO: 33); or (iv) a combination thereof. In some embodiments, an scFv-Fc comprises a light chain variable domain comprising: (i) LCDR1 (SEQ ID NO: 27); (ii) LCDR2 (LAS; SEQ ID NO: 30); and (iii) LCDR3 (SEQ ID NO: 33). In some embodiments, an scFv-Fc comprises (a) a heavy chain variable domain comprising: (i) HCDR1 (SEQ ID NO: 18); (ii) HCDR2 (SEQ ID NO: 21); (iii) HCDR3 (SEQ ID NO: 24); or (iv) a combination thereof; and (b) a light chain variable domain comprising: (i) LCDR1 (SEQ ID NO: 27); (ii) LCDR2 (LAS; SEQ ID NO: 30); (iii) LCDR3 (SEQ ID NO: 33); or (iv) a combination thereof. In some embodiments, an scFv-Fc comprises (a) a heavy chain variable domain comprising: (i) HCDR1 (SEQ ID NO: 18); (ii) HCDR2 (SEQ ID NO: 21); and (iii) HCDR3 (SEQ ID NO: 24); and (b) a light chain variable domain comprising: (i) LCDR1 (SEQ ID NO: 27); (ii) LCDR2 (LAS; SEQ ID NO: 30); and (iii) LCDR3 (SEQ ID NO: 33).

[0567] In some embodiments, a polyribonucleotide described herein encodes all or part of a PGDM1400 antibody. In some embodiments, a polyribonucleotide described herein encodes an immunoglobulin chain comprising a heavy chain variable domain, wherein the heavy chain variable domain comprises: (i) HCDR1 (SEQ ID NO: 18); (ii) HCDR2 (SEQ ID NO: 21); (iii) HCDR3 (SEQ ID NO: 24); or (iv) a combination thereof. In some embodiments, a polyribonucleotide described herein encodes an immunoglobulin chain comprising a heavy chain variable domain, wherein the heavy chain variable domain comprises: (i) HCDR1 (SEQ ID NO: 18); (ii) HCDR2 (SEQ ID NO: 21); and (iii) HCDR3 (SEQ ID NO: 24). In some embodiments, a polyribonucleotide described herein encodes an immunoglobulin chain comprising a light chain variable domain, wherein the light chain variable domain comprises: (i) LCDR1 (SEQ ID NO: 27); (ii) LCDR2 (LAS; SEQ ID NO: 30); (iii) LCDR3 (SEQ ID NO: 33); or (iv) a combination thereof. In some embodiments, a polyribonucleotide described herein encodes an immunoglobulin chain comprising a light chain variable domain, wherein the light chain variable domain comprises: (i) LCDR1 (SEQ ID NO: 27); (ii) LCDR2 (LAS; SEQ ID NO: 30); and (iii) LCDR3 (SEQ ID NO: 33). In some embodiments, a polyribonucleotide described herein encodes an immunoglobulin chain comprising a heavy chain variable domain and a light chain variable domain, wherein the heavy chain variable domain comprises: (i) HCDR1 (SEQ ID NO: 18); (ii) HCDR2 (SEQ ID NO: 21); (iii) HCDR3 (SEQ ID NO: 24); or (iv) a combination thereof; and the light chain variable domain comprises: (i) LCDR1 (SEQ ID NO: 27); (ii) LCDR2 (LAS; SEQ ID NO: 30); (iii) LCDR3 (SEQ ID NO: 33); or (iv) a combination thereof. In some embodiments, a polyribonucleotide described herein encodes an immunoglobulin chain comprising a heavy chain variable domain and a light chain variable domain, wherein the heavy chain variable domain comprises: (i) HCDR1 (SEQ ID NO: 18); (ii) HCDR2 (SEQ ID NO: 21); and (iii) HCDR3 (SEQ ID NO: 24); and the light chain variable domain comprises: (i) LCDR1 (SEQ ID NO: 27); (ii) LCDR2 (LAS; SEQ ID NO: 30); and (iii) LCDR3 (SEQ ID NO: 33).

[0568] In some embodiments, a scFv-Fc comprises a heavy chain variable domain having at least 80%, 85%, 90%, 91%, 92%, 93%, 94%, 95%, 96%, 97%, 98%, or 99% sequence identity to an amino acid sequence represented by SEQ ID NO: 36. In some embodiments, a scFv-Fc comprises a light chain variable domain having at least 80%, 85%, 90%, 91%, 92%, 93%, 94%, 95%, 96%, 97%, 98%, or 99% identity to an amino acid sequence represented by SEQ ID NO: 43. In some embodiments, a scFv-Fc comprises a heavy chain variable domain represented by SEQ ID NO: 36. In some embodiments, scFv-Fc comprises a light chain variable domain represented by SEQ ID NO: 43.

[0569] In some embodiments, a scFv-Fc comprises a heavy chain variable domain having at least 80%, 85%, 90%, 91%, 92%, 93%, 94%, 95%, 96%, 97%, 98%, or 99% sequence identity to an amino acid sequence represented by SEQ ID NO: 1494. In some embodiments, a scFv-Fc comprises a light chain variable domain having at least 80%, 85%, 90%, 91%, 92%, 93%, 94%, 95%, 96%, 97%, 98%, or 99% identity to an amino acid sequence represented by SEQ ID NO: 43. In some embodiments, a scFv-Fc comprises a heavy chain variable domain represented by SEQ ID NO: 1494. In some embodiments, scFv-Fc comprises a light chain variable domain represented by SEQ ID NO: 43.

[0570] In some embodiments, an antibody agent (e.g., a PGDM1400 antibody agent) encoded by one or more polyribonucleotides provided herein comprises a heavy chain variable domain that comprises one or more mutations relative to an amino acid sequence represented by SEQ ID NO: 1494. In some embodiments, substitution mutations are present at residues 3 and/or 5 relative to SEQ ID NO: 1494. In some embodiments, a substitution mutation at residue 3 results in a positively charged amino acid being present at residue 3 relative to SEQ ID NO: 1494. Positively charged amino acids include Lys (K), Arg (R), and His (H). In some embodiments, a substitution mutation at residue 3 relative to SEQ ID NO: 1494 comprises Q3H. In some embodiments, a substitution mutation at residue 5 results in a polar amino acid being present at residue 5 relative to SEQ ID NO: 1494. Polar amino acids include Ser (S), Thr (T), Tyr (Y), Asn (N), and Gln (Q). In some embodiments, a substitution mutation at residue 5 relative to SEQ ID NO: 1494 comprises V5T.

[0571] In some embodiments, an antibody agent (e.g., a PGDM1400 antibody agent) encoded by one or more polyribonucleotides provided herein comprises a heavy chain variable domain that comprises SEQ ID NO: 1494 with substitution mutations Q3H and V5T.

[0572] In some embodiments, a polyribonucleotide described herein encodes an immunoglobulin chain comprising a heavy chain variable domain having at least 80%, 85%, 90%, 91%, 92%, 93%, 94%, 95%, 96%, 97%, 98%, or 99% sequence identity to an amino acid sequence represented by SEQ ID NO: 36. In some embodiments, a polyribonucleotide described herein encodes an immunoglobulin chain comprising a light chain variable domain having at least 80%, 85%, 90%, 91%, 92%, 93%, 94%, 95%, 96%, 97%, 98%, or 99% sequence identity to an amino acid sequence represented by SEQ ID NO: 43. In some embodiments, a polyribonucleotide described herein encodes an immunoglobulin chain comprising a heavy chain variable domain and a light chain variable domain, wherein the heavy chain variable domain has at least 80%, 85%, 90%, 91%, 92%, 93%, 94%, 95%, 96%, 97%, 98%, or 99% sequence identity to an amino acid sequence represented by SEQ ID NO: 36, and wherein the light chain variable domain has at least 80%, 85%, 90%, 91%, 92%, 93%, 94%, 95%, 96%, 97%, 98%, or 99% sequence identity to an amino acid sequence represented by SEQ ID NO: 43.

[0573] An Fc region of scFv-Fc described herein may include an Fc region comprising any particular heavy chain constant domain that correspond to the different classes of immunoglobulins which include a, b, E, y, and p, respectively. An Fc region of the scFv-Fc described herein may comprise a human Fc region sequence (e.g., a human IgG1, IgG2, IgG3 or IgG4 Fc region) comprising an amino acid modification (e.g., a substitution) at one or more amino acid positions. In some embodiments, a conventional antibody encoded by one or more polyribonucleotides as described herein comprises a Fc region that comprises a G1m3, G1m17, or a G1m17,1 allotype.

[0574] In some embodiments, a scFv-Fc encoded by one or more polyribonucleotides as described herein may comprise one or more heavy chain constant domains. In some embodiments, one or more heavy chain constant domains comprise a CH₃ domain. In some embodiments, a scFv-Fc as described herein may include the L/S mutation within the CH₃ region (for enhanced FcRn binding) (Zalevsky J et al., Nat Biotechnol. 2010, which is herein incorporated by reference). Such mutations are noted as M428L and N434S according to EU numbering (i.e., M88L and N94S within the CH₃ domain, e.g., SEQ ID NO: 113, 116, or 1495), and referred to herein as “LS” or “L/S”.” (see e.g., FIG. 5, Panel D). In some embodiments, a scFv-Fc comprises an E294 deletion (for Fc hypersialylation) (Bas M et al., J Immunol 2019, which is herein incorporated by reference). In some embodiments, a CH₃ domain comprises an amino acid sequence at least 90%, 91%, 92%, 93%, 94%, 95%, 96%, 97%, 98%, or 99% identical to a sequence represented by represented in SEQ ID NO: 116. In some embodiments, a scFv-Fc comprises a CH₃ domain that comprises an amino acid sequence represented in SEQ ID NO: 116.

[0575] In some embodiments, a scFv-Fc comprises a CH₃ domain comprising one or more of the following mutations: Y349C, T366S, L368A, and Y407V (according to EU numbering). Such a combination of mutations is referred to herein as “cah”. In some embodiments, a scFv-Fc comprises a CH₃ domain comprising one or more mutations selected from: S354C and T366W (according to EU numbering). Such a combination of CH₃ mutations is referred to herein as “cak”. In some embodiments, a scFv-Fc comprises a CH₃ domain that comprises a G1m3, G1m17, or a G1m17,1 allotype. In some embodiments, a scFv-Fc comprises a CH₃ domain that comprises an amino acid sequence at least 90%, 91%, 92%, 93%, 94%, 95%, 96%, 97%, 98%, or 99% identical to a sequence represented by represented in any one of SEQ ID NOs: 113, 116, 119, 122, 125, 128, 131, 134, 137, 140, 143, 146, or 1495. In some embodiments, a scFv-Fc comprises a CH₃ domain that comprises an amino acid sequence represented in any one of SEQ ID NOs: 113, 116, 119, 122, 125, 128, 131, 134, 137, 140, 143, 146, or 1495.

[0576] In some embodiments, a scFv-Fc antibody agent encoded by one or more polyribonucleotides as described herein comprises a CH₃ domain that comprises a G1m3, G1m17, or a G1m17,1 allotype. In some embodiments, a scFv-Fc antibody agent encoded by one or more polyribonucleotides as described herein comprises a CH₃ domain having an amino acid sequence at least 90%, 91%, 92%, 93%, 94%, 95%, 96%, 97%, 98%, or 99% identical to a sequence represented in any one of SEQ ID NOs: 113, 116, 119, 122, 125, 128, 131, 134, 137, 140, 143, 146, or 1495. In some embodiments, a scFv-Fc antibody agent encoded by one or more polyribonucleotides as described herein comprises a CH₃ domain having an amino acid sequence represented in any one of SEQ ID NOs: 113, 116, 119, 122, 125, 128, 131, 134, 137, 140, 143, 146, or 1495. In some embodiments, a CH₃ domain comprises amino acid sequence SEQ ID NO: 1495 with substitution mutations D16E and L18M.

[0577] In some embodiments, a CH₃ domain comprises one or more substitution mutations, M88L, N94S, or a combination thereof, relative to the amino acid sequence according to SEQ ID NO: 1495. In some embodiments, a CH₃ domain comprises substitution mutations at residue 16 and residue 18 relative to the amino acid sequence according to SEQ ID NO: 1495. In some embodiments, a CH₃ domain comprises an amino acid sequence SEQ ID NO: 1495 with substitution mutations D16E and L18M. In some embodiments, a CH₃ domain comprises or consists of an amino acid sequence according to SEQ ID NO: 116.

[0578] As described herein, a scFv-Fc comprises a scFv fused to an Fc domain of an antibody. Accordingly, such formats do not comprise a CH₁ domain.

[0579] An scFv of scFv-Fc may be encoded by a sequence that includes in 5′ to 3′ direction, the following domains: a heavy chain variable domain (VH)-linker-a light chain variable domain (VL)-Fc domain. In some embodiments, scFv-Fc fusion may be encoded by a sequence that includes, in 5′ to 3′ direction, the following domains: a VL-linker-VH-Fc domain.

[0580] In some embodiments, a scFv-Fc comprises a hinge domain that comprises an amino acid modification that comprises a C220S mutation (according to EU numbering). Such a mutated hinge domain is referred to herein as “Hinge_S” or “C/S”. In some embodiments, a scFv-Fc comprises a hinge domain that comprises an amino acid sequence that is at least 90%, 91%, 92%, 93%, 94%, 95%, 96%, 97%, 98%, or 99% identical to a sequence represented in SEQ ID NO: 164. In some embodiments, a scFv-Fc comprises a hinge domain that comprises an amino acid sequence represented in SEQ ID NO: 164.

[0581] In some embodiments, a scFv-Fc comprises a CH₂ domain that comprises an amino acid sequence at least 90%, 91%, 92%, 93%, 94%, 95%, 96%, 97%, 98%, or 99% identical to represented in SEQ ID NO: 96. In some embodiments, a scFv-Fc comprises a CH₂ domain that comprises an amino acid sequence represented in SEQ ID NO: 96. In some embodiments, a scFv-Fc comprises a CH₂ domain that comprises one or more mutations (e.g., with respect to SEQ ID NO: 96). For example, in some embodiments, a scFv-Fc comprises one or more of the following mutations: G236A, A330L, and I332E (according to EU numbering). Such a combination of mutations is referred to herein as “GAALIE”. Such mutations in the CH₂ domain have been associated with increased affinity to Fc receptors FcgRIIA and FcgRIII for enhanced antibody effector function. In some embodiments, a scFv-Fc comprises a CH₂ domain that comprises an amino acid sequence that is at least 90%, 91%, 92%, 93%, 94%, 95%, 96%, 97%, 98%, or 99% identical to SEQ ID NO: 99 or 102. In some embodiments, a scFv-Fc comprises a CH₂ domain that comprises an amino acid sequence represented in SEQ ID NO: 99 or 102. In some embodiments, a scFv-Fc comprises one or more mutations selected from: G236A and I332E (according to EU numbering). Such a combination of CH₂ mutations is referred to herein as “GAIE”. In some embodiments, a scFv-Fc comprises a CH₂ domain that comprises an amino acid sequence at least 90%, 91%, 92%, 93%, 94%, 95%, 96%, 97%, 98%, or 99% identical to SEQ ID NO: 104. In some embodiments, a scFv-Fc comprises a CH₂ domain that comprises an amino acid sequence represented in SEQ ID NO: 104. In some embodiments, a scFv-Fc comprises a mutation: G236A (according to EU numbering), referred to herein as “GA”. In some embodiments, a scFv-Fc comprises a CH₂ domain that comprises an amino acid sequence at least 90%, 91%, 92%, 93%, 94%, 95%, 96%, 97%, 98%, or 99% identical to SEQ ID NO: 107. In some embodiments, a scFv-Fc comprises a CH₂ domain that comprises an amino acid sequence represented in SEQ ID NO: 107. In some embodiments, a scFv-Fc comprises a mutation: I332E (according to EU numbering), referred to herein as “IE”. In some embodiments, a scFv-Fc comprises a CH₂ domain that comprises an amino acid sequence at least 90%, 91%, 92%, 93%, 94%, 95%, 96%, 97%, 98%, or 99% identical to SEQ ID NO: 110. In some embodiments, a scFv-Fc comprises a CH₂ domain that comprises an amino acid sequence represented in SEQ ID NO: 110.

[0582] In some embodiments, a scFv-Fc encoded by one or more polyribonucleotides as described herein comprises a signal peptide comprising a husec2 signal peptide. In some embodiments, a scFv-Fc comprises a signal peptide comprising SEQ ID NO: 1.

[0583] In some embodiments, a scFv-Fc encoded by one or more polyribonucleotides as described herein comprises an immunoglobulin chain encoded by a nucleic acid sequence that has at least 80%, 85%, 90%, 91%, 92%, 93%, 94%, 95%, 96%, 97%, 98%, or 99% sequence identity to a sequence represented by SEQ ID NO: 458-841, 1341-1342, 1344-1345, 1347-1348, 1350-1351, 1356-1357, 1359-1360, 1362-1363, 1365-1366, 1368-1369, 1371-1372, 1374-1375, 1377-1378, 1380-1381, 1383-1384, 1386-1387, 1389-1390, 1392-1393, 1395-1396, 1398-1399, 1401-1402, 1404-1405, 1407-1408, 1410-1411, 1413-1414, 1416-1417, 1419-1420, 1422-1423, 1425-1426, 1428-1429, 1431-1432, 1434-1435, 1437-1438, 1440-1441, 1443-1444, 1446-1447, 1449-1450, 1552-1553, 1455-1456, or 1458-1459. In some embodiments, a scFv-Fc encoded by one or more polyribonucleotides as described herein comprises an immunoglobulin chain encoded by a nucleic acid sequence represented by any one of SEQ ID NOs: 458-841, 1341-1342, 1344-1345, 1347-1348, 1350-1351, 1356-1357, 1359-1360, 1362-1363, 1365-1366, 1368-1369, 1371-1372, 1374-1375, 1377-1378, 1380-1381, 1383-1384, 1386-1387, 1389-1390, 1392-1393, 1395-1396, 1398-1399, 1401-1402, 1404-1405, 1407-1408, 1410-1411, 1413-1414, 1416-1417, 1419-1420, 1422-1423, 1425-1426, 1428-1429, 1431-1432, 1434-1435, 1437-1438, 1440-1441, 1443-1444, 1446-1447, 1449-1450, 1552-1553, 1455-1456, or 1458-1459.

[0584] In some embodiments, a scFv-Fc encoded by one or more polyribonucleotides as described herein comprises an immunoglobulin chain comprising an amino acid sequence that has at least 80%, 85%, 90%, 91%, 92%, 93%, 94%, 95%, 96%, 97%, 98%, or 99% sequence identity to a sequence represented by SEQ ID NO: 1343, 1346, 1349, 1352, 1358, 1361, 1364, 1367, 1370, 1373, 1376, 1379, 1382, 1385, 1388, 1391, 1394, 1397, 1400, 1403, 1406, 1409, 1412, 1415, 1418, 1421, 1424, 1427, 1430, 1433, 1436, 1439, 1442, 1445, 1448, 1451, 1454, 1457, 1460. In some embodiments, a scFv-Fc encoded by one or more polyribonucleotides as described herein comprises an immunoglobulin chain comprising an amino acid sequence represented by any one of SEQ ID NOs: 1343, 1346, 1349, 1352, 1358, 1361, 1364, 1367, 1370, 1373, 1376, 1379, 1382, 1385, 1388, 1391, 1394, 1397, 1400, 1403, 1406, 1409, 1412, 1415, 1418, 1421, 1424, 1427, 1430, 1433, 1436, 1439, 1442, 1445, 1448, 1451, 1454, 1457, or 1460.

[0585] Exemplary configurations of scFv-Fc, as described herein, is shown in Table 6 below.

TABLE 6
Exemplary scFv-Fc Configurations

| scFv-Fc formats | Allotype | VH | VL | Hinge | CH2 | CH3 |
|---|---|---|---|---|---|---|
| PGDM1400 VH- | G1m3 | PGDM1400 | PGDM1400 | Hinge_S | CH2 | CH3_G1m3/17 |
| (G4S)4-VL G1m3 | | | | | | |
| CH1del C220S | | | | | | |
| PGDM1400 VH- | G1m3 | PGDM1400 | PGDM1400 | Hinge_S | CH2 | CH3_LS_G1m3/17 |
| (G4S)4-VL G1m3 | | | | | | |
| CH1del C220S LS | | | | | | |
| PGDM1400 VH- | G1m3 | PGDM1400 | PGDM1400 | Hinge_S | CH2_GAALIE | CH3_LS_G1m3/17 |
| (G4S)4-VL G1m3 | | | | | | |
| CH1del C220S GAALIE | | | | | | |
| LS | | | | | | |
| PGDM1400 VH- | G1m3 | PGDM1400 | PGDM1400 | Hinge_S | CH2_GAIE | CH3_LS_G1m3/17 |
| (G4S)4-VL G1m3 | | | | | | |
| CH1del C220S GAIE | | | | | | |
| LS | | | | | | |
| PGDM1400 VH- | G1m3 | PGDM1400 | PGDM1400 | Hinge_S | CH2_GA | CH3_LS_G1m3/17 |
| (G4S)4-VL G1m3 | | | | | | |
| CH1del C220S GA LS | | | | | | |
| PGDM1400 VH- | G1m3 | PGDM1400 | PGDM1400 | Hinge_S | CH2_IE | CH3_LS_G1m3/17 |
| (G4S)4-VL G1m3 | | | | | | |
| CH1del C220S IE LS | | | | | | |
| PGDM1400 VH- | G1m3 | PGDM1400 | PGDM1400 | Hinge_S | CH2 | CH3_cah_LS_G1m3/17 |
| (G4S)4-VL G1m3 | | | | | | |
| CH1del C220S cah LS | | | | | | |
| PGDM1400 VH- | G1m3 | PGDM1400 | PGDM1400 | Hinge_S | CH2_GAALIE | CH3_cah_LS_G1m3/17 |
| (G4S)4-VL G1m3 | | | | | | |
| CH1del C220S GAALIE | | | | | | |
| cah LS | | | | | | |
| PGDM1400 VH- | G1m3 | PGDM1400 | PGDM1400 | Hinge_S | CH2_GAIE | CH3_cah_LS_G1m3/17 |
| (G4S)4-VL G1m3 | | | | | | |
| CH1del C220S GAIE | | | | | | |
| cah LS | | | | | | |
| PGDM1400 VH- | G1m3 | PGDM1400 | PGDM1400 | Hinge_S | CH2_GA | CH3_cah_LS_G1m3/17 |
| (G4S)4-VL G1m3 | | | | | | |
| CH1del C220S GA cah | | | | | | |
| LS | | | | | | |
| PGDM1400 VH- | G1m3 | PGDM1400 | PGDM1400 | Hinge_S | CH2_IE | CH3_cah_LS_G1m3/17 |
| (G4S)4-VL G1m3 | | | | | | |
| CH1del C220S IE cah | | | | | | |
| LS | | | | | | |
| PGDM1400 VH- | G1m3 | PGDM1400 | PGDM1400 | Hinge_S | CH2 | CH3_cak_LS_G1m3/17 |
| (G4S)4-VL G1m3 | | | | | | |
| CH1del C220S cak LS | | | | | | |
| PGDM1400 VH- | G1m3 | PGDM1400 | PGDM1400 | Hinge_S | CH2_GAALIE | CH3_cak_LS_G1m3/17 |
| (G4S)4-VL G1m3 | | | | | | |
| CH1del C220S GAALIE | | | | | | |
| cak LS | | | | | | |
| PGDM1400 VH- | G1m3 | PGDM1400 | PGDM1400 | Hinge_S | CH2_GAIE | CH3_cak_LS_G1m3/17 |
| (G4S)4-VL G1m3 | | | | | | |
| CH1del C220S GAIE | | | | | | |
| cak LS | | | | | | |
| PGDM1400 VH- | G1m3 | PGDM1400 | PGDM1400 | Hinge_S | CH2_GA | CH3_cak_LS_G1m3/17 |
| (G4S)4-VL G1m3 | | | | | | |
| CH1del C220S GA cak | | | | | | |
| LS | | | | | | |
| PGDM1400 VH- | G1m3 | PGDM1400 | PGDM1400 | Hinge_S | CH2_IE | CH3_cak_LS_G1m3/17 |
| (G4S)4-VL G1m3 | | | | | | |
| CH1del C220S IE cak | | | | | | |
| LS | | | | | | |
| PGDM1400 VH- | G1m17 | PGDM1400 | PGDM1400 | Hinge_S | CH2 | CH3_G1m3/17 |
| (G4S)4-VL G1m17 | | | | | | |
| CH1del C220S | | | | | | |
| PGDM1400 VH- | G1m17 | PGDM1400 | PGDM1400 | Hinge_S | CH2 | CH3_LS_G1m3/17 |
| (G4S)4-VL G1m17 | | | | | | |
| CH1del C220S LS | | | | | | |
| PGDM1400 VH- | G1m17 | PGDM1400 | PGDM1400 | Hinge_S | CH2_GAALIE | CH3_LS_G1m3/17 |
| (G4S)4-VL G1m17 | | | | | | |
| CH1del C220S GAALIE | | | | | | |
| LS | | | | | | |
| PGDM1400 VH- | G1m17 | PGDM1400 | PGDM1400 | Hinge_S | CH2_GAIE | CH3_LS_G1m3/17 |
| (G4S)4-VL G1m17 | | | | | | |
| CH1del C220S GAIE | | | | | | |
| LS | | | | | | |
| PGDM1400 VH- | G1m17 | PGDM1400 | PGDM1400 | Hinge_S | CH2_GA | CH3_LS_G1m3/17 |
| (G4S)4-VL G1m17 | | | | | | |
| CH1del C220S GA LS | | | | | | |
| PGDM1400 VH- | G1m17 | PGDM1400 | PGDM1400 | Hinge_S | CH2_IE | CH3_LS_G1m3/17 |
| (G4S)4-VL G1m17 | | | | | | |
| CH1del C220S IE LS | | | | | | |
| PGDM1400 VH- | G1m17 | PGDM1400 | PGDM1400 | Hinge_S | CH2 | CH3_cah_LS_G1m3/17 |
| (G4S)4-VL G1m17 | | | | | | |
| CH1del C220S cah LS | | | | | | |
| PGDM1400 VH- | G1m17 | PGDM1400 | PGDM1400 | Hinge_S | CH2_GAALIE | CH3_cah_LS_G1m3/17 |
| (G4S)4-VL G1m17 | | | | | | |
| CH1del C220S GAALIE | | | | | | |
| cah LS | | | | | | |
| PGDM1400 VH- | G1m17 | PGDM1400 | PGDM1400 | Hinge_S | CH2_GAIE | CH3_cah_LS_G1m3/17 |
| (G4S)4-VL G1m17 | | | | | | |
| CH1del C220S GAIE | | | | | | |
| cah LS | | | | | | |
| PGDM1400 VH- | G1m17 | PGDM1400 | PGDM1400 | Hinge_S | CH2_GA | CH3_cah_LS_G1m3/17 |
| (G4S)4-VL G1m17 | | | | | | |
| CH1del C220S GA cah | | | | | | |
| LS | | | | | | |
| PGDM1400 VH- | G1m17 | PGDM1400 | PGDM1400 | Hinge_S | CH2_IE | CH3_cah_LS_G1m3/17 |
| (G4S)4-VL G1m17 | | | | | | |
| CH1del C220S IE cah | | | | | | |
| LS | | | | | | |
| PGDM1400 VH- | G1m17 | PGDM1400 | PGDM1400 | Hinge_S | CH2 | CH3_cak_LS_G1m3/17 |
| (G4S)4-VL G1m17 | | | | | | |
| CH1del C220S cak LS | | | | | | |
| PGDM1400 VH- | G1m17 | PGDM1400 | PGDM1400 | Hinge_S | CH2_GAALIE | CH3_cak_LS_G1m3/17 |
| (G4S)4-VL G1m17 | | | | | | |
| CH1del C220S GAALIE | | | | | | |
| cak LS | | | | | | |
| PGDM1400 VH- | G1m17 | PGDM1400 | PGDM1400 | Hinge_S | CH2_GAIE | CH3_cak_LS_G1m3/17 |
| (G4S)4-VL G1m17 | | | | | | |
| CH1del C220S GAIE | | | | | | |
| cak LS | | | | | | |
| PGDM1400 VH- | G1m17 | PGDM1400 | PGDM1400 | Hinge_S | CH2_GA | CH3_cak_LS_G1m3/17 |
| (G4S)4-VL G1m17 | | | | | | |
| CH1del C220S GA cak | | | | | | |
| LS | | | | | | |
| PGDM1400 VH- | G1m17 | PGDM1400 | PGDM1400 | Hinge_S | CH2_IE | CH3_cak_LS_G1m3/17 |
| (G4S)4-VL G1m17 | | | | | | |
| CH1del C220S IE cak | | | | | | |
| LS | | | | | | |
| PGDM1400 VH- | G1m17,1 | PGDM1400 | PGDM1400 | Hinge_S | CH2 | CH3_G1m17,1 |
| (G4S)4-VL G1m17,1 | | | | | | |
| CH1del C220S | | | | | | |
| PGDM1400 VH- | G1m17,1 | PGDM1400 | PGDM1400 | Hinge_S | CH2 | CH3_LS_G1m17,1 |
| (G4S)4-VL G1m17,1 | | | | | | |
| CH1del C220S LS | | | | | | |
| PGDM1400 VH- | G1m17,1 | PGDM1400 | PGDM1400 | Hinge_S | CH2_GAALIE | CH3_LS_G1m17,1 |
| (G4S)4-VL G1m17,1 | | | | | | |
| CH1del C220S GAALIE | | | | | | |
| LS | | | | | | |
| PGDM1400 VH- | G1m17,1 | PGDM1400 | PGDM1400 | Hinge_S | CH2_GAIE | CH3_LS_G1m17,1 |
| (G4S)4-VL G1m17,1 | | | | | | |
| CH1del C220S GAIE | | | | | | |
| LS | | | | | | |
| PGDM1400 VH- | G1m17,1 | PGDM1400 | PGDM1400 | Hinge_S | CH2_GA | CH3_LS_G1m17,1 |
| (G4S)4-VL G1m17,1 | | | | | | |
| CH1del C220S GA LS | | | | | | |
| PGDM1400 VH- | G1m17,1 | PGDM1400 | PGDM1400 | Hinge_S | CH2_IE | CH3_LS_G1m17,1 |
| (G4S)4-VL G1m17,1 | | | | | | |
| CH1del C220S IE LS | | | | | | |
| PGDM1400 VH- | G1m17,1 | PGDM1400 | PGDM1400 | Hinge_S | CH2 | CH3_cah_LS_G1m17,1 |
| (G4S)4-VL G1m17,1 | | | | | | |
| CH1del C220S cah LS | | | | | | |
| PGDM1400 VH- | G1m17,1 | PGDM1400 | PGDM1400 | Hinge_S | CH2_GAALIE | CH3_cah_LS_G1m17,1 |
| (G4S)4-VL G1m17,1 | | | | | | |
| CH1del C220S GAALIE | | | | | | |
| cah LS | | | | | | |
| PGDM1400 VH- | G1m17,1 | PGDM1400 | PGDM1400 | Hinge_S | CH2_GAIE | CH3_cah_LS_G1m17,1 |
| (G4S)4-VL G1m17,1 | | | | | | |
| CH1del C220S GAIE | | | | | | |
| cah LS | | | | | | |
| PGDM1400 VH- | G1m17,1 | PGDM1400 | PGDM1400 | Hinge_S | CH2_GA | CH3_cah_LS_G1m17,1 |
| (G4S)4-VL G1m17,1 | | | | | | |
| CH1del C220S GA cah | | | | | | |
| LS | | | | | | |
| PGDM1400 VH- | G1m17,1 | PGDM1400 | PGDM1400 | Hinge_S | CH2_IE | CH3_cah_LS_G1m17,1 |
| (G4S)4-VL G1m17,1 | | | | | | |
| CH1del C220S IE cah | | | | | | |
| LS | | | | | | |
| PGDM1400 VH- | G1m17,1 | PGDM1400 | PGDM1400 | Hinge_S | CH2 | CH3_cak_LS_G1m17,1 |
| (G4S)4-VL G1m17,1 | | | | | | |
| CH1del C220S cak LS | | | | | | |
| PGDM1400 VH- | G1m17,1 | PGDM1400 | PGDM1400 | Hinge_S | CH2_GAALIE | CH3_cak_LS_G1m17,1 |
| (G4S)4-VL G1m17,1 | | | | | | |
| CH1del C220S GAALIE | | | | | | |
| cak LS | | | | | | |
| PGDM1400 VH- | G1m17,1 | PGDM1400 | PGDM1400 | Hinge_S | CH2_GAIE | CH3_cak_LS_G1m17,1 |
| (G4S)4-VL G1m17,1 | | | | | | |
| CH1del C220S GAIE | | | | | | |
| cak LS | | | | | | |
| PGDM1400 VH- | G1m17,1 | PGDM1400 | PGDM1400 | Hinge_S | CH2_GA | CH3_cak_LS_G1m17,1 |
| (G4S)4-VL G1m17,1 | | | | | | |
| CH1del C220S GA cak | | | | | | |
| LS | | | | | | |
| PGDM1400 VH- | G1m17,1 | PGDM1400 | PGDM1400 | Hinge_S | CH2_IE | CH3_cak_LS_G1m17,1 |
| (G4S)4-VL G1m17,1 | | | | | | |
| CH1del C220S IE cak | | | | | | |
| LS | | | | | | |
| PGDM1400 VH- | G1m3 | PGDM1400 | PGDM1400 | Hinge_S | CH2 | CH3_G1m3/17 |
| (G4S)5-VL G1m3 | | | | | | |
| CH1del C220S | | | | | | |
| PGDM1400 VH- | G1m3 | PGDM1400 | PGDM1400 | Hinge_S | CH2 | CH3_LS_G1m3/17 |
| (G4S)5-VL G1m3 | | | | | | |
| CH1del C220SLS | | | | | | |
| PGDM1400 VH- | G1m3 | PGDM1400 | PGDM1400 | Hinge_S | CH2_GAALIE | CH3_LS_G1m3/17 |
| (G4S)5-VL G1m3 | | | | | | |
| CH1del C220S GAALIE | | | | | | |
| LS | | | | | | |
| PGDM1400 VH- | G1m3 | PGDM1400 | PGDM1400 | Hinge_S | CH2_GAIE | CH3_LS_G1m3/17 |
| (G4S)5-VL | | | | | | |
| G1m3CH1del C220S | | | | | | |
| GAIE LS | | | | | | |
| PGDM1400 VH- | G1m3 | PGDM1400 | PGDM1400 | Hinge_S | CH2_GA | CH3_LS_G1m3/17 |
| (G4S)5-VL | | | | | | |
| G1m3CH1del C220S | | | | | | |
| GA LS | | | | | | |
| PGDM1400 VH- | G1m3 | PGDM1400 | PGDM1400 | Hinge_S | CH2_IE | CH3_LS_G1m3/17 |
| (G4S)5-VL | | | | | | |
| G1m3CH1del C220S IE | | | | | | |
| LS | | | | | | |
| PGDM1400 VH- | G1m3 | PGDM1400 | PGDM1400 | Hinge_S | CH2 | CH3_cah_LS_G1m3/17 |
| (G4S)5-VL | | | | | | |
| G1m3CH1del C220S | | | | | | |
| cah LS | | | | | | |
| PGDM1400 VH- | G1m3 | PGDM1400 | PGDM1400 | Hinge_S | CH2_GAALIE | CH3_cah_LS_G1m3/17 |
| (G4S)5-VL | | | | | | |
| G1m3CH1del C220S | | | | | | |
| GAALIE cah LS | | | | | | |
| PGDM1400 VH- | G1m3 | PGDM1400 | PGDM1400 | Hinge_S | CH2_GAIE | CH3_cah_LS_G1m3/17 |
| (G4S)5-VL | | | | | | |
| G1m3CH1del C220S | | | | | | |
| GAIE cah LS | | | | | | |
| PGDM1400 VH- | G1m3 | PGDM1400 | PGDM1400 | Hinge_S | CH2_GA | CH3_cah_LS_G1m3/17 |
| (G4S)5-VL | | | | | | |
| G1m3CH1del C220S | | | | | | |
| GA cah LS | | | | | | |
| PGDM1400 VH- | G1m3 | PGDM1400 | PGDM1400 | Hinge_S | CH2_IE | CH3_cah_LS_G1m3/17 |
| (G4S)5-VL | | | | | | |
| G1m3CH1del C220S IE | | | | | | |
| cah LS | | | | | | |
| PGDM1400 VH- | G1m3 | PGDM1400 | PGDM1400 | Hinge_S | CH2 | CH3_cak_LS_G1m3/17 |
| (G4S)5-VL | | | | | | |
| G1m3CH1del C220S | | | | | | |
| cak LS | | | | | | |
| PGDM1400 VH- | G1m3 | PGDM1400 | PGDM1400 | Hinge_S | CH2_GAALIE | CH3_cak_LS_G1m3/17 |
| (G4S)5-VL | | | | | | |
| G1m3CH1del C220S | | | | | | |
| GAALIE cak LS | | | | | | |
| PGDM1400 VH- | G1m3 | PGDM1400 | PGDM1400 | Hinge_S | CH2_GAIE | CH3_cak_LS_G1m3/17 |
| (G4S)5-VL | | | | | | |
| G1m3CH1del C220S | | | | | | |
| GAIE cak LS | | | | | | |
| PGDM1400 VH- | G1m3 | PGDM1400 | PGDM1400 | Hinge_S | CH2_GA | CH3_cak_LS_G1m3/17 |
| (G4S)5-VL | | | | | | |
| G1m3CH1del C220S | | | | | | |
| GA cak LS | | | | | | |
| PGDM1400 VH- | G1m3 | PGDM1400 | PGDM1400 | Hinge_S | CH2_IE | CH3_cak_LS_G1m3/17 |
| (G4S)5-VL | | | | | | |
| G1m3CH1del C220S IE | | | | | | |
| cak LS | | | | | | |
| PGDM1400 VH- | G1m17 | PGDM1400 | PGDM1400 | Hinge_S | CH2 | CH3_G1m3/17 |
| (G4S)5-VL G1m17 | | | | | | |
| CH1del C220S | | | | | | |
| PGDM1400 VH- | G1m17 | PGDM1400 | PGDM1400 | Hinge_S | CH2 | CH3_LS_G1m3/17 |
| (G4S)5-VL G1m17 | | | | | | |
| CH1del C220S LS | | | | | | |
| PGDM1400 VH- | G1m17 | PGDM1400 | PGDM1400 | Hinge_S | CH2_GAALIE | CH3_LS_G1m3/17 |
| (G4S)5-VL G1m17 | | | | | | |
| CH1del C220S GAALIE | | | | | | |
| cak LS | | | | | | |
| PGDM1400 VH- | G1m17 | PGDM1400 | PGDM1400 | Hinge_S | CH2_GAIE | CH3_LS_G1m3/17 |
| (G4S)5-VL G1m17 | | | | | | |
| CH1del C220S GAIE LS | | | | | | |
| PGDM1400 VH- | G1m17 | PGDM1400 | PGDM1400 | Hinge_S | CH2_GA | CH3_LS_G1m3/17 |
| (G4S)5-VL G1m17 | | | | | | |
| CH1del C220S GA LS | | | | | | |
| PGDM1400 VH- | G1m17 | PGDM1400 | PGDM1400 | Hinge_S | CH2_IE | CH3_LS_G1m3/17 |
| (G4S)5-VL G1m17 | | | | | | |
| CH1del C220S IE LS | | | | | | |
| PGDM1400 VH- | G1m17 | PGDM1400 | PGDM1400 | Hinge_S | CH2 | CH3_cah_LS_G1m3/17 |
| (G4S)5-VL G1m17 | | | | | | |
| CH1del C220S cah LS | | | | | | |
| PGDM1400 VH- | G1m17 | PGDM1400 | PGDM1400 | Hinge_S | CH2_GAALIE | CH3_cah_LS_G1m3/17 |
| (G4S)5-VL G1m17 | | | | | | |
| CH1del C220S GAALIE | | | | | | |
| cah LS | | | | | | |
| PGDM1400 VH- | G1m17 | PGDM1400 | PGDM1400 | Hinge_S | CH2_GAIE | CH3_cah_LS_G1m3/17 |
| (G4S)5-VL G1m17 | | | | | | |
| CH1del C220S GAIE | | | | | | |
| cah LS | | | | | | |
| PGDM1400 VH- | G1m17 | PGDM1400 | PGDM1400 | Hinge_S | CH2_GA | CH3_cah_LS_G1m3/17 |
| (G4S)5-VL G1m17 | | | | | | |
| CH1del C220S GA cah | | | | | | |
| LS | | | | | | |
| PGDM1400 VH- | G1m17 | PGDM1400 | PGDM1400 | Hinge_S | CH2_IE | CH3_cah_LS_G1m3/17 |
| (G4S)5-VL G1m17 | | | | | | |
| CH1del C220S IE cah | | | | | | |
| LS | | | | | | |
| PGDM1400 VH- | G1m17 | PGDM1400 | PGDM1400 | Hinge_S | CH2 | CH3_cak_LS_G1m3/17 |
| (G4S)5-VL G1m17 | | | | | | |
| CH1del C220S cak LS | | | | | | |
| PGDM1400 VH- | G1m17 | PGDM1400 | PGDM1400 | Hinge_S | CH2_GAALIE | CH3_cak_LS_G1m3/17 |
| (G4S)5-VL G1m17 | | | | | | |
| CH1del C220S GAALIE | | | | | | |
| cak LS | | | | | | |
| PGDM1400 VH- | G1m17 | PGDM1400 | PGDM1400 | Hinge_S | CH2_GAIE | CH3_cak_LS_G1m3/17 |
| (G4S)5-VL G1m17 | | | | | | |
| CH1del C220S GAIE | | | | | | |
| cak LS | | | | | | |
| PGDM1400 VH- | G1m17 | PGDM1400 | PGDM1400 | Hinge_S | CH2_GA | CH3_cak_LS_G1m3/17 |
| (G4S)5-VL G1m17 | | | | | | |
| CH1del C220S GA cak | | | | | | |
| LS | | | | | | |
| PGDM1400 VH- | G1m17 | PGDM1400 | PGDM1400 | Hinge_S | CH2_IE | CH3_cak_LS_G1m3/17 |
| (G4S)5-VL G1m17 | | | | | | |
| CH1del C220S IE cak | | | | | | |
| LS | | | | | | |
| PGDM1400 VH- | G1m17,1 | PGDM1400 | PGDM1400 | Hinge_S | CH2 | CH3_G1m17,1 |
| (G4S)5-VL G1m17,1 | | | | | | |
| CH1del C220S | | | | | | |
| PGDM1400 VH- | G1m17,1 | PGDM1400 | PGDM1400 | Hinge_S | CH2 | CH3_LS_G1m17,1 |
| (G4S)5-VL G1m17,1 | | | | | | |
| CH1del C220S LS | | | | | | |
| PGDM1400 VH- | G1m17,1 | PGDM1400 | PGDM1400 | Hinge_S | CH2_GAALIE | CH3_LS_G1m17,1 |
| (G4S)5-VL G1m17,1 | | | | | | |
| CH1del C220S GAALIE | | | | | | |
| LS | | | | | | |
| PGDM1400 VH- | G1m17,1 | PGDM1400 | PGDM1400 | Hinge_S | CH2_GAIE | CH3_LS_G1m17,1 |
| (G4S)5-VL G1m17,1 | | | | | | |
| CH1del C220S GAIE LS | | | | | | |
| PGDM1400 VH- | G1m17,1 | PGDM1400 | PGDM1400 | Hinge_S | CH2_GA | CH3_LS_G1m17,1 |
| (G4S)5-VL G1m17,1 | | | | | | |
| CH1del C220S GA LS | | | | | | |
| PGDM1400 VH- | G1m17,1 | PGDM1400 | PGDM1400 | Hinge_S | CH2_IE | CH3_LS_G1m17,1 |
| (G4S)5-VL G1m17,1 | | | | | | |
| CH1del C220S IE LS | | | | | | |
| PGDM1400 VH- | G1m17,1 | PGDM1400 | PGDM1400 | Hinge_S | CH2 | CH3_cah_LS_G1m17,1 |
| (G4S)5-VL G1m17,1 | | | | | | |
| CH1del C220S cah LS | | | | | | |
| PGDM1400 VH- | G1m17,1 | PGDM1400 | PGDM1400 | Hinge_S | CH2_GAALIE | CH3_cah_LS_G1m17,1 |
| (G4S)5-VL G1m17,1 | | | | | | |
| CH1del C220S GAALIE | | | | | | |
| cah LS | | | | | | |
| PGDM1400 VH- | G1m17,1 | PGDM1400 | PGDM1400 | Hinge_S | CH2_GAIE | CH3_cah_LS_G1m17,1 |
| (G4S)5-VL G1m17,1 | | | | | | |
| CH1del C220S GAIE | | | | | | |
| cah LS | | | | | | |
| PGDM1400 VH- | G1m17,1 | PGDM1400 | PGDM1400 | Hinge_S | CH2_GA | CH3_cah_LS_G1m17,1 |
| (G4S)5-VL G1m17,1 | | | | | | |
| CH1del C220S GA cah | | | | | | |
| LS | | | | | | |
| PGDM1400 VH- | G1m17,1 | PGDM1400 | PGDM1400 | Hinge_S | CH2_IE | CH3_cah_LS_G1m17,1 |
| (G4S)5-VL G1m17,1 | | | | | | |
| CH1del C220S IE cah | | | | | | |
| LS | | | | | | |
| PGDM1400 VH- | G1m17,1 | PGDM1400 | PGDM1400 | Hinge_S | CH2 | CH3_cak_LS_G1m17,1 |
| (G4S)5-VL G1m17,1 | | | | | | |
| CH1del C220S cak LS | | | | | | |
| PGDM1400 VH- | G1m17,1 | PGDM1400 | PGDM1400 | Hinge_S | CH2_GAALIE | CH3_cak_LS_G1m17,1 |
| (G4S)5-VL G1m17,1 | | | | | | |
| CH1del C220S GAALIE | | | | | | |
| cak LS | | | | | | |
| PGDM1400 VH- | G1m17,1 | PGDM1400 | PGDM1400 | Hinge_S | CH2_GAIE | CH3_cak_LS_G1m17,1 |
| (G4S)5-VL G1m17,1 | | | | | | |
| CH1del C220S GAIE | | | | | | |
| cak LS | | | | | | |
| PGDM1400 VH- | G1m17,1 | PGDM1400 | PGDM1400 | Hinge_S | CH2_GA | CH3_cak_LS_G1m17,1 |
| (G4S)5-VL G1m17,1 | | | | | | |
| CH1del C220S GA cak | | | | | | |
| LS | | | | | | |
| PGDM1400 VH- | G1m17,1 | PGDM1400 | PGDM1400 | Hinge_S | CH2_IE | CH3_cak_LS_G1m17,1 |
| (G4S)5-VL G1m17,1 | | | | | | |
| CH1del C220S IE cak | | | | | | |
| LS | | | | | | |
| PGDM1400 VL-(G4S)4- | G1m3 | PGDM1400 | PGDM1400 | Hinge_S | CH2 | CH3_G1m3/17 |
| VH G1m3 CH1del | | | | | | |
| C220S | | | | | | |
| PGDM1400 VL-(G4S)4- | G1m3 | PGDM1400 | PGDM1400 | Hinge_S | CH2 | CH3_LS_G1m3/17 |
| VH G1m3 CH1del | | | | | | |
| C220S LS | | | | | | |
| PGDM1400 VL-(G4S)4- | G1m3 | PGDM1400 | PGDM1400 | Hinge_S | CH2_GAALIE | CH3_LS_G1m3/17 |
| VH G1m3 CH1del | | | | | | |
| C220S GAALIE LS | | | | | | |
| PGDM1400 VL-(G4S)4- | G1m3 | PGDM1400 | PGDM1400 | Hinge_S | CH2_GAIE | CH3_LS_G1m3/17 |
| VH G1m3 CH1del | | | | | | |
| C220S GAIE LS | | | | | | |
| PGDM1400 VL-(G4S)4- | G1m3 | PGDM1400 | PGDM1400 | Hinge_S | CH2_GA | CH3_LS_G1m3/17 |
| VH G1m3 CH1del | | | | | | |
| C220S GA LS | | | | | | |
| PGDM1400 VL-(G4S)4- | G1m3 | PGDM1400 | PGDM1400 | Hinge_S | CH2_IE | CH3_LS_G1m3/17 |
| VH G1m3 CH1del | | | | | | |
| C220S IE LS | | | | | | |
| PGDM1400 VL-(G4S)4- | G1m3 | PGDM1400 | PGDM1400 | Hinge_S | CH2 | CH3_cah_LS_G1m3/17 |
| VH G1m3 CH1del | | | | | | |
| C220S cah LS | | | | | | |
| PGDM1400 VL-(G4S)4- | G1m3 | PGDM1400 | PGDM1400 | Hinge_S | CH2_GAALIE | CH3_cah_LS_G1m3/17 |
| VH G1m3 CH1del | | | | | | |
| C220S GAALIE cah LS | | | | | | |
| PGDM1400 VL-(G4S)4- | G1m3 | PGDM1400 | PGDM1400 | Hinge_S | CH2_GAIE | CH3_cah_LS_G1m3/17 |
| VH G1m3 CH1del | | | | | | |
| C220S GAIE cah LS | | | | | | |
| PGDM1400 VL-(G4S)4- | G1m3 | PGDM1400 | PGDM1400 | Hinge_S | CH2_GA | CH3_cah_LS_G1m3/17 |
| VH G1m3 CH1del | | | | | | |
| C220S GA cah LS | | | | | | |
| PGDM1400 VL-(G4S)4- | G1m3 | PGDM1400 | PGDM1400 | Hinge_S | CH2_IE | CH3_cah_LS_G1m3/17 |
| VH G1m3 CH1del | | | | | | |
| C220S IE cah LS | | | | | | |
| PGDM1400 VL-(G4S)4- | G1m3 | PGDM1400 | PGDM1400 | Hinge_S | CH2 | CH3_cak_LS_G1m3/17 |
| VH G1m3 CH1del | | | | | | |
| C220S cak LS | | | | | | |
| PGDM1400 VL-(G4S)4- | G1m3 | PGDM1400 | PGDM1400 | Hinge_S | CH2_GAALIE | CH3_cak_LS_G1m3/17 |
| VH G1m3 CH1del | | | | | | |
| C220S GAALIE cak LS | | | | | | |
| PGDM1400 VL-(G4S)4- | G1m3 | PGDM1400 | PGDM1400 | Hinge_S | CH2_GAIE | CH3_cak_LS_G1m3/17 |
| VH G1m3 CH1del | | | | | | |
| C220S GAIE cak LS | | | | | | |
| PGDM1400 VL-(G4S)4- | G1m3 | PGDM1400 | PGDM1400 | Hinge_S | CH2_GA | CH3_cak_LS_G1m3/17 |
| VH G1m3 CH1del | | | | | | |
| C220S GA cak LS | | | | | | |
| PGDM1400 VL-(G4S)4- | G1m3 | PGDM1400 | PGDM1400 | Hinge_S | CH2_IE | CH3_cak_LS_G1m3/17 |
| VH G1m3 CH1del | | | | | | |
| C220S IE cak LS | | | | | | |
| PGDM1400 VL-(G4S)4- | G1m17 | PGDM1400 | PGDM1400 | Hinge_S | CH2 | CH3_G1m3/17 |
| VH G1m17 CH1del | | | | | | |
| C220S | | | | | | |
| PGDM1400 VL-(G4S)4- | G1m17 | PGDM1400 | PGDM1400 | Hinge_S | CH2 | CH3_LS_G1m3/17 |
| VH G1m17 CH1del | | | | | | |
| C220S LS | | | | | | |
| PGDM1400 VL-(G4S)4- | G1m17 | PGDM1400 | PGDM1400 | Hinge_S | CH2_GAALIE | CH3_LS_G1m3/17 |
| VH G1m17 CH1del | | | | | | |
| C220S GAALIE LS | | | | | | |
| PGDM1400 VL-(G4S)4- | G1m17 | PGDM1400 | PGDM1400 | Hinge_S | CH2_GAIE | CH3_LS_G1m3/17 |
| VH G1m17 CH1del | | | | | | |
| C220S GAIE LS | | | | | | |
| PGDM1400 VL-(G4S)4- | G1m17 | PGDM1400 | PGDM1400 | Hinge_S | CH2_GA | CH3_LS_G1m3/17 |
| VH G1m17 CH1del | | | | | | |
| C220S GA LS | | | | | | |
| PGDM1400 VL-(G4S)4- | G1m17 | PGDM1400 | PGDM1400 | Hinge_S | CH2_IE | CH3_LS_G1m3/17 |
| VH G1m17 CH1del | | | | | | |
| C220S IE LS | | | | | | |
| PGDM1400 VL-(G4S)4- | G1m17 | PGDM1400 | PGDM1400 | Hinge_S | CH2 | CH3_cah_LS_G1m3/17 |
| VH G1m17 CH1del | | | | | | |
| C220S cah LS | | | | | | |
| PGDM1400 VL-(G4S)4- | G1m17 | PGDM1400 | PGDM1400 | Hinge_S | CH2_GAALIE | CH3_cah_LS_G1m3/17 |
| VH G1m17 CH1del | | | | | | |
| C220S GAALIE cah LS | | | | | | |
| PGDM1400 VL-(G4S)4- | G1m17 | PGDM1400 | PGDM1400 | Hinge_S | CH2_GAIE | CH3_cah_LS_G1m3/17 |
| VH G1m17 CH1del | | | | | | |
| C220S GAIE cah LS | | | | | | |
| PGDM1400 VL-(G4S)4- | G1m17 | PGDM1400 | PGDM1400 | Hinge_S | CH2_GA | CH3_cah_LS_G1m3/17 |
| VH G1m17 CH1del | | | | | | |
| C220S GA cah LS | | | | | | |
| PGDM1400 VL-(G4S)4- | G1m17 | PGDM1400 | PGDM1400 | Hinge_S | CH2_IE | CH3_cah_LS_G1m3/17 |
| VH G1m17 CH1del | | | | | | |
| C220S IE cah LS | | | | | | |
| PGDM1400 VL-(G4S)4- | G1m17 | PGDM1400 | PGDM1400 | Hinge_S | CH2 | CH3_cak_LS_G1m3/17 |
| VH G1m17 CH1del | | | | | | |
| C220S cak LS | | | | | | |
| PGDM1400 VL-(G4S)4- | G1m17 | PGDM1400 | PGDM1400 | Hinge_S | CH2_GAALIE | CH3_cak_LS_G1m3/17 |
| VH G1m17 CH1del | | | | | | |
| C220S GAALIE cak LS | | | | | | |
| PGDM1400 VL-(G4S)4- | G1m17 | PGDM1400 | PGDM1400 | Hinge_S | CH2_GAIE | CH3_cak_LS_G1m3/17 |
| VH G1m17 CH1del | | | | | | |
| C220S GAIE cak LS | | | | | | |
| PGDM1400 VL-(G4S)4- | G1m17 | PGDM1400 | PGDM1400 | Hinge_S | CH2_GA | CH3_cak_LS_G1m3/17 |
| VH G1m17 CH1del | | | | | | |
| C220S GA cak LS | | | | | | |
| PGDM1400 VL-(G4S)4- | G1m17 | PGDM1400 | PGDM1400 | Hinge_S | CH2_IE | CH3_cak_LS_G1m3/17 |
| VH G1m17 CH1del | | | | | | |
| C220S IE cak LS | | | | | | |
| PGDM1400 VL-(G4S)4- | G1m17,1 | PGDM1400 | PGDM1400 | Hinge_S | CH2 | CH3_G1m17,1 |
| VH G1m17,1 CH1del | | | | | | |
| C220S | | | | | | |
| PGDM1400 VL-(G4S)4- | G1m17,1 | PGDM1400 | PGDM1400 | Hinge_S | CH2 | CH3_LS_G1m17,1 |
| VH G1m17,1 CH1del | | | | | | |
| C220S LS | | | | | | |
| PGDM1400 VL-(G4S)4- | G1m17,1 | PGDM1400 | PGDM1400 | Hinge_S | CH2_GAALIE | CH3_LS_G1m17,1 |
| VH G1m17,1 CH1del | | | | | | |
| C220S GAALIE LS | | | | | | |
| PGDM1400 VL-(G4S)4- | G1m17,1 | PGDM1400 | PGDM1400 | Hinge_S | CH2_GAIE | CH3_LS_G1m17,1 |
| VH G1m17,1 CH1del | | | | | | |
| C220S GAIE LS | | | | | | |
| PGDM1400 VL-(G4S)4- | G1m17,1 | PGDM1400 | PGDM1400 | Hinge_S | CH2_GA | CH3_LS_G1m17,1 |
| VH G1m17,1 CH1del | | | | | | |
| C220S GA LS | | | | | | |
| PGDM1400 VL-(G4S)4- | G1m17,1 | PGDM1400 | PGDM1400 | Hinge_S | CH2_IE | CH3_LS_G1m17,1 |
| VH G1m17,1 CH1del | | | | | | |
| C220S IE LS | | | | | | |
| PGDM1400 VL-(G4S)4- | G1m17,1 | PGDM1400 | PGDM1400 | Hinge_S | CH2 | CH3_cah_LS_G1m17,1 |
| VH G1m17,1 CH1del | | | | | | |
| C220S cah LS | | | | | | |
| PGDM1400 VL-(G4S)4- | G1m17,1 | PGDM1400 | PGDM1400 | Hinge_S | CH2_GAALIE | CH3_cah_LS_G1m17,1 |
| VH G1m17,1 CH1del | | | | | | |
| C220S GAALIE cah LS | | | | | | |
| PGDM1400 VL-(G4S)4- | G1m17,1 | PGDM1400 | PGDM1400 | Hinge_S | CH2_GAIE | CH3_cah_LS_G1m17,1 |
| VH G1m17,1 CH1del | | | | | | |
| C220S GAIE cah LS | | | | | | |
| PGDM1400 VL-(G4S)4- | G1m17,1 | PGDM1400 | PGDM1400 | Hinge_S | CH2_GA | CH3_cah_LS_G1m17,1 |
| VH G1m17,1 CH1del | | | | | | |
| C220S GA cah LS | | | | | | |
| PGDM1400 VL-(G4S)4- | G1m17,1 | PGDM1400 | PGDM1400 | Hinge_S | CH2_IE | CH3_cah_LS_G1m17,1 |
| VH G1m17,1 CH1del | | | | | | |
| C220S IE cah LS | | | | | | |
| PGDM1400 VL-(G4S)4- | G1m17,1 | PGDM1400 | PGDM1400 | Hinge_S | CH2 | CH3_cak_LS_G1m17,1 |
| VH G1m17,1 CH1del | | | | | | |
| C220S cak LS | | | | | | |
| PGDM1400 VL-(G4S)4- | G1m17,1 | PGDM1400 | PGDM1400 | Hinge_S | CH2_GAALIE | CH3_cak_LS_G1m17,1 |
| VH G1m17,1 CH1del | | | | | | |
| C220S GAALIE cak LS | | | | | | |
| PGDM1400 VL-(G4S)4- | G1m17,1 | PGDM1400 | PGDM1400 | Hinge_S | CH2_GAIE | CH3_cak_LS_G1m17,1 |
| VH G1m17,1 CH1del | | | | | | |
| C220S GAIE cak LS | | | | | | |
| PGDM1400 VL-(G4S)4- | G1m17,1 | PGDM1400 | PGDM1400 | Hinge_S | CH2_GA | CH3_cak_LS_G1m17,1 |
| VH G1m17,1 CH1del | | | | | | |
| C220S GA cak LS | | | | | | |
| PGDM1400 VL-(G4S)4- | G1m17,1 | PGDM1400 | PGDM1400 | Hinge_S | CH2_IE | CH3_cak_LS_G1m17,1 |
| VH G1m17,1 CH1del | | | | | | |
| C220S IE cak LS | | | | | | |
| PGDM1400 VL-(G4S)5- | G1m3 | PGDM1400 | PGDM1400 | Hinge_S | CH2 | CH3_G1m3/17 |
| VH G1m3 CH1del | | | | | | |
| C220S | | | | | | |
| PGDM1400 VL-(G4S)5- | G1m3 | PGDM1400 | PGDM1400 | Hinge_S | CH2 | CH3_LS_G1m3/17 |
| VH G1m3 CH1del | | | | | | |
| C220S LS | | | | | | |
| PGDM1400 VL-(G4S)5- | G1m3 | PGDM1400 | PGDM1400 | Hinge_S | CH2_GAALIE | CH3_LS_G1m3/17 |
| VH G1m3 CH1del | | | | | | |
| C220S GAALIE LS | | | | | | |
| PGDM1400 VL-(G4S)5- | G1m3 | PGDM1400 | PGDM1400 | Hinge_S | CH2_GAIE | CH3_LS_G1m3/17 |
| VH G1m3 CH1del | | | | | | |
| C220S GAIE LS | | | | | | |
| PGDM1400 VL-(G4S)5- | G1m3 | PGDM1400 | PGDM1400 | Hinge_S | CH2_GA | CH3_LS_G1m3/17 |
| VH G1m3 CH1del | | | | | | |
| C220S GA LS | | | | | | |
| PGDM1400 VL-(G4S)5- | G1m3 | PGDM1400 | PGDM1400 | Hinge_S | CH2_IE | CH3_LS_G1m3/17 |
| VH G1m3 CH1del | | | | | | |
| C220S IE LS | | | | | | |
| PGDM1400 VL-(G4S)5- | G1m3 | PGDM1400 | PGDM1400 | Hinge_S | CH2 | CH3_cah_LS_G1m3/17 |
| VH G1m3 CH1del | | | | | | |
| C220S cah LS | | | | | | |
| PGDM1400 VL-(G4S)5- | G1m3 | PGDM1400 | PGDM1400 | Hinge_S | CH2_GAALIE | CH3_cah_LS_G1m3/17 |
| VH G1m3 CH1del | | | | | | |
| C220S GAALIE cah LS | | | | | | |
| PGDM1400 VL-(G4S)5- | G1m3 | PGDM1400 | PGDM1400 | Hinge_S | CH2_GAIE | CH3_cah_LS_G1m3/17 |
| VH G1m3 CH1del | | | | | | |
| C220S GAIE cah LS | | | | | | |
| PGDM1400 VL-(G4S)5- | G1m3 | PGDM1400 | PGDM1400 | Hinge_S | CH2_GA | CH3_cah_LS_G1m3/17 |
| VH G1m3 CH1del | | | | | | |
| C220S GA cah LS | | | | | | |
| PGDM1400 VL-(G4S)5- | G1m3 | PGDM1400 | PGDM1400 | Hinge_S | CH2_IE | CH3_cah_LS_G1m3/17 |
| VH G1m3 CH1del | | | | | | |
| C220S IE cah LS | | | | | | |
| PGDM1400 VL-(G4S)5- | G1m3 | PGDM1400 | PGDM1400 | Hinge_S | CH2 | CH3_cak_LS_G1m3/17 |
| VH G1m3 CH1del | | | | | | |
| C220S cak LS | | | | | | |
| PGDM1400 VL-(G4S)5- | G1m3 | PGDM1400 | PGDM1400 | Hinge_S | CH2_GAALIE | CH3_cak_LS_G1m3/17 |
| VH G1m3 CH1del | | | | | | |
| C220S GAALIE cak LS | | | | | | |
| PGDM1400 VL-(G4S)5- | G1m3 | PGDM1400 | PGDM1400 | Hinge_S | CH2_GAIE | CH3_cak_LS_G1m3/17 |
| VH G1m3 CH1del | | | | | | |
| C220S GAIE cak LS | | | | | | |
| PGDM1400 VL-(G4S)5- | G1m3 | PGDM1400 | PGDM1400 | Hinge_S | CH2_GA | CH3_cak_LS_G1m3/17 |
| VH G1m3 CH1del | | | | | | |
| C220S GA cak LS | | | | | | |
| PGDM1400 VL-(G4S)5- | G1m3 | PGDM1400 | PGDM1400 | Hinge_S | CH2_IE | CH3_cak_LS_G1m3/17 |
| VH G1m3 CH1del | | | | | | |
| C220S IE cak LS | | | | | | |
| PGDM1400 VL-(G4S)5- | G1m17 | PGDM1400 | PGDM1400 | Hinge_S | CH2 | CH3_G1m3/17 |
| VH G1m17 CH1del | | | | | | |
| C220S | | | | | | |
| PGDM1400 VL-(G4S)5- | G1m17 | PGDM1400 | PGDM1400 | Hinge_S | CH2 | CH3_LS_G1m3/17 |
| VH G1m17 CH1del | | | | | | |
| C220S LS | | | | | | |
| PGDM1400 VL-(G4S)5- | G1m17 | PGDM1400 | PGDM1400 | Hinge_S | CH2_GAALIE | CH3_LS_G1m3/17 |
| VH G1m17 CH1del | | | | | | |
| C220S GAALIE LS | | | | | | |
| PGDM1400 VL-(G4S)5- | G1m17 | PGDM1400 | PGDM1400 | Hinge_S | CH2_GAIE | CH3_LS_G1m3/17 |
| VH G1m17 CH1del | | | | | | |
| C220S GAIE LS | | | | | | |
| PGDM1400 VL-(G4S)5- | G1m17 | PGDM1400 | PGDM1400 | Hinge_S | CH2_GA | CH3_LS_G1m3/17 |
| VH G1m17 CH1del | | | | | | |
| C220S GA LS | | | | | | |
| PGDM1400 VL-(G4S)5- | G1m17 | PGDM1400 | PGDM1400 | Hinge_S | CH2_IE | CH3_LS_G1m3/17 |
| VH G1m17 CH1del | | | | | | |
| C220S IE LS | | | | | | |
| PGDM1400 VL-(G4S)5- | G1m17 | PGDM1400 | PGDM1400 | Hinge_S | CH2 | CH3_cah_LS_G1m3/17 |
| VH G1m17 CH1del | | | | | | |
| C220S cah LS | | | | | | |
| PGDM1400 VL-(G4S)5- | G1m17 | PGDM1400 | PGDM1400 | Hinge_S | CH2_GAALIE | CH3_cah_LS_G1m3/17 |
| VH G1m17 CH1del | | | | | | |
| C220S GAALIE cah LS | | | | | | |
| PGDM1400 VL-(G4S)5- | G1m17 | PGDM1400 | PGDM1400 | Hinge_S | CH2_GAIE | CH3_cah_LS_G1m3/17 |
| VH G1m17 CH1del | | | | | | |
| C220S GAIE cah LS | | | | | | |
| PGDM1400 VL-(G4S)5- | G1m17 | PGDM1400 | PGDM1400 | Hinge_S | CH2_GA | CH3_cah_LS_G1m3/17 |
| VH G1m17 CH1del | | | | | | |
| C220S GA cah LS | | | | | | |
| PGDM1400 VL-(G4S)5- | G1m17 | PGDM1400 | PGDM1400 | Hinge_S | CH2_IE | CH3_cah_LS_G1m3/17 |
| VH G1m17 CH1del | | | | | | |
| C220S IE cah LS | | | | | | |
| PGDM1400 VL-(G4S)5- | G1m17 | PGDM1400 | PGDM1400 | Hinge_S | CH2 | CH3_cak_LS_G1m3/17 |
| VH G1m17 CH1del | | | | | | |
| C220S cak LS | | | | | | |
| PGDM1400 VL-(G4S)5- | G1m17 | PGDM1400 | PGDM1400 | Hinge_S | CH2_GAALIE | CH3_cak_LS_G1m3/17 |
| VH G1m17 CH1del | | | | | | |
| C220S GAALIE cak LS | | | | | | |
| PGDM1400 VL-(G4S)5- | G1m17 | PGDM1400 | PGDM1400 | Hinge_S | CH2_GAIE | CH3_cak_LS_G1m3/17 |
| VH G1m17 CH1del | | | | | | |
| C220S GAIE cak LS | | | | | | |
| PGDM1400 VL-(G4S)5- | G1m17 | PGDM1400 | PGDM1400 | Hinge_S | CH2_GA | CH3_cak_LS_G1m3/17 |
| VH G1m17 CH1del | | | | | | |
| C220S GA cak LS | | | | | | |
| PGDM1400 VL-(G4S)5- | G1m17 | PGDM1400 | PGDM1400 | Hinge_S | CH2_IE | CH3_cak_LS_G1m3/17 |
| VH G1m17 CH1del | | | | | | |
| C220S IE cak LS | | | | | | |
| PGDM1400 VL-(G4S)5- | G1m17,1 | PGDM1400 | PGDM1400 | Hinge_S | CH2 | CH3_G1m17,1 |
| VH G1m17,1 CH1del | | | | | | |
| C220S | | | | | | |
| PGDM1400 VL-(G4S)5- | G1m17,1 | PGDM1400 | PGDM1400 | Hinge_S | CH2 | CH3_LS_G1m17,1 |
| VH G1m17,1 CH1del | | | | | | |
| C220S LS | | | | | | |
| PGDM1400 VL-(G4S)5- | G1m17,1 | PGDM1400 | PGDM1400 | Hinge_S | CH2_GAALIE | CH3_LS_G1m17,1 |
| VH G1m17,1 CH1del | | | | | | |
| C220S GAALIE LS | | | | | | |
| PGDM1400 VL-(G4S)5- | G1m17,1 | PGDM1400 | PGDM1400 | Hinge_S | CH2_GAIE | CH3_LS_G1m17,1 |
| VH G1m17,1 CH1del | | | | | | |
| C220S GAIE LS | | | | | | |
| PGDM1400 VL-(G4S)5- | G1m17,1 | PGDM1400 | PGDM1400 | Hinge_S | CH2_GA | CH3_LS_G1m17,1 |
| VH G1m17,1 CH1del | | | | | | |
| C220S GA LS | | | | | | |
| PGDM1400 VL-(G4S)5- | G1m17,1 | PGDM1400 | PGDM1400 | Hinge_S | CH2_IE | CH3_LS_G1m17,1 |
| VH G1m17,1 CH1del | | | | | | |
| C220S IE LS | | | | | | |
| PGDM1400 VL-(G4S)5- | G1m17,1 | PGDM1400 | PGDM1400 | Hinge_S | CH2 | CH3_cah_LS_G1m17,1 |
| VH G1m17,1 CH1del | | | | | | |
| C220S cah LS | | | | | | |
| PGDM1400 VL-(G4S)5- | G1m17,1 | PGDM1400 | PGDM1400 | Hinge_S | CH2_GAALIE | CH3_cah_LS_G1m17,1 |
| VH G1m17,1 CH1del | | | | | | |
| C220S GAALIE cah LS | | | | | | |
| PGDM1400 VL-(G4S)5- | G1m17,1 | PGDM1400 | PGDM1400 | Hinge_S | CH2_GAIE | CH3_cah_LS_G1m17,1 |
| VH G1m17,1 CH1del | | | | | | |
| C220S GAIE cah LS | | | | | | |
| PGDM1400 VL-(G4S)5- | G1m17,1 | PGDM1400 | PGDM1400 | Hinge_S | CH2_GA | CH3_cah_LS_G1m17,1 |
| VH G1m17,1 CH1del | | | | | | |
| C220S GA cah LS | | | | | | |
| PGDM1400 VL-(G4S)5- | G1m17,1 | PGDM1400 | PGDM1400 | Hinge_S | CH2_IE | CH3_cah_LS_G1m17,1 |
| VH G1m17,1 CH1del | | | | | | |
| C220S IE cah LS | | | | | | |
| PGDM1400 VL-(G4S)5- | G1m17,1 | PGDM1400 | PGDM1400 | Hinge_S | CH2 | CH3_cak_LS_G1m17,1 |
| VH G1m17,1 CH1del | | | | | | |
| C220S cak LS | | | | | | |
| PGDM1400 VL-(G4S)5- | G1m17,1 | PGDM1400 | PGDM1400 | Hinge_S | CH2_GAALIE | CH3_cak_LS_G1m17,1 |
| VH G1m17,1 CH1del | | | | | | |
| C220S GAALIE cak LS | | | | | | |
| PGDM1400 VL-(G4S)5- | G1m17,1 | PGDM1400 | PGDM1400 | Hinge_S | CH2_GAIE | CH3_cak_LS_G1m17,1 |
| VH G1m17,1 CH1del | | | | | | |
| C220S GAIE cak LS | | | | | | |
| PGDM1400 VL-(G4S)5- | G1m17,1 | PGDM1400 | PGDM1400 | Hinge_S | CH2_GA | CH3_cak_LS_G1m17,1 |
| VH G1m17,1 CH1del | | | | | | |
| C220S GA cak LS | | | | | | |
| PGDM1400 VL-(G4S)5- | G1m17,1 | PGDM1400 | PGDM1400 | Hinge_S | CH2_IE | CH3_cak_LS_G1m17,1 |
| VH G1m17,1 CH1del | | | | | | |
| C220S IE cak LS | | | | | | |

### III. Polyribonucleotides

### A. Exemplary Polyribonucleotides Features

[0586] Polyribonucleotides described herein encode an immunoglobulin chain of an antibody agent as described herein (e.g., HIV antibody agents). Additionally, polyribonucleotides described herein, in some embodiments, include other elements such as a secretion signal-encoding region. In some embodiments, polyribonucleotides described herein can comprise a nucleotide sequence that encodes a 5′UTR of interest and/or a 3′ UTR of interest. In some embodiments, polynucleotides described herein can comprise a nucleotide sequence that encodes a polyA tail. In some embodiments, polyribonucleotides described herein may comprise a 5′ cap, which may be incorporated during transcription, or joined to a polyribonucleotide post-transcription.

### 1. Secretion Signal-Encoding Region

[0587] According to certain embodiments, a signal peptide (or signal sequence) is fused, either directly or through a linker, to an encoded immunoglobulin chain of an antibody agent described herein.

[0588] In some embodiments, an open reading frame of the RNA described herein encodes an immunoglobulin chain of an antibody agent described herein with a signal sequence, e.g., that is functional in mammalian cells. In some embodiments, a utilized signal sequence is “intrinsic” in that it is, in nature, associated with (e.g., linked to) an immunoglobulin chain of an antibody agent or portion thereof.

[0589] In some embodiments, a utilized signal sequence is heterologous to an immunoglobulin chain of an antibody agent or portion thereof—e.g., is not naturally part of an immunoglobulin chain of an antibody agent or portion thereof.

[0590] In some embodiments, signal peptides are sequences, which are typically characterized by a length of about 15 to 30 amino acids.

[0591] In many embodiments, signal peptides are positioned at the N-terminus of an immunoglobulin chain of an antibody agent or portion thereof, without being limited thereto. In some embodiments, signal peptides preferably allow the transport of an immunoglobulin chain of an antibody agent or portion thereof encoded by RNAs of the present disclosure with which they are associated into a defined cellular compartment, preferably the cell surface, the endoplasmic reticulum (ER) or the endosomal-lysosomal compartment.

[0592] In some embodiments, a polyribonucleotide, as provided herein, that encodes an immunoglobulin chain of an antibody agent (e.g., an HIV antibody agent) may comprise a ribonucleic acid sequence encoding a secretion signal. In some embodiments, a ribonucleic acid sequence encoding a secretion signal allows an immunoglobulin chain of an antibody agent encoded by the polyribonucleotide to be secreted upon translation by cells, e.g., present in a subject, thus yielding a plasma concentration of a biologically active HIV antibody agent.

[0593] In some embodiments, a ribonucleic acid sequence encoding a secretion signal included in a polyribonucleotide consists of or comprises a nucleotide sequence that encodes a human secretion signal. For example, in some embodiments, such a human secretion signal may be or comprises the amino acid sequence of SEQ ID NO: 1 (husec2). In some embodiments, a ribonucleic acid sequence encoding a secretion signal included in a polyribonucleotide consists of or comprises a nucleotide sequence that encodes a non-human secretion signal. In some embodiments, a ribonucleic acid sequence encoding a secretion signal included in a polyribonucleotide encoding a heavy chain domain of an antibody agent may comprise a ribonucleic acid sequence that encodes a human secretion signal amino acid sequence. In some embodiments, a polyribonucleotide encoding a human secretion signal comprises SEQ ID NO: 2, 4, 6, or 8. In some embodiments, a ribonucleic acid sequence encoding a secretion signal included in a polyribonucleotide encoding a light chain domain of a HIV antibody agent may comprise a nucleotide sequence that encodes a human secretion signal amino acid sequence of SEQ ID NO: 1 (husec2). In some embodiments, a ribonucleic acid sequence encoding a secretion signal included in a polyribonucleotide encoding a light chain domain of a HIV antibody agent may comprise a nucleotide sequence that encodes a human secretion signal amino acid sequence. In some embodiments, a polyribonucleotide encoding a human secretion signal comprises SEQ ID NO: 2,4, 6, or 8.

[0594] In some embodiments, an RNA sequence encodes an immunoglobulin chain of an antibody agent as described herein may comprise or otherwise be linked to a signal sequence (e.g., secretory sequence), such as those listed in Table 6, or a sequence having 1, 2, 3, 4, or 5 amino acid differences relative thereto. In some embodiments, a signal sequence such as SEQ ID NO: 1479, or a sequence having 1, 2, 3, 4, or at the most 5 amino acid differences relative thereto, is utilized. In some embodiments, a signal sequence such as SEQ ID NO: 1480, or a sequence having 1, 2, 3, 4, or at the most 5 amino acid differences relative thereto, is utilized.

[0595] In some embodiments, a signal sequence is selected from those included in the Table 7 below:

TABLE 7
Exemplary Signal sequences

| Signal | SEQ ID NO: | Sequence (Amino Acid) |
|---|---|---|
| HSV-1 gD SP | 1463 | MGGAAARLGAVILFVVIVGLHGVRSKY |
| HSV-2 gD SP | 1464 | MGRLTSGVGTAALLVVAVGLRVVCA |
| HSV-2 | 1465 | MGRLTSGVGTAALLVVAVGLRVVCAKYA |
| SARS-CoV-2-S | 1466 | MFVFLVLLPLVSSQCVNLT |
| human Ig heavy chain | 1467 | MDWIWRILFLVGAATGAHSQM |
| signal peptide | | |
| human Ig heavy chain | 1468 | MDWTWRVFCLLAVAPGAHS |
| signal peptide | | |
| HuIgGk signal peptide | 1469 | METPAQLLFLLLLWLPDTTG |
| IgE heavy chain epsilon- | 1470 | MDWTWILFLVAAATRVHS |
| 1signal peptide | | |
| Japanese encephalitis PRM | 1471 | MLGSNSGQRVVFTILLLLVAPAYS |
| signal sequence | | |
| VSVg protein signal | 1472 | MKCLLYLAFLFIGVNCA |
| sequence | | |
| Exemplary signal sequence | 1473 | MDWTWILFLVAAATRVHS |
| Exemplary signal sequence | 1474 | ETPAQLLFLLLLWLPDTTG |
| Exemplary signal sequence | 1475 | MLGSNSGQRVVFTILLLLVAPAYS |
| Exemplary signal sequence | 1476 | MKCLLYLAFLFIGVNCA |
| Exemplary signal sequence | 1477 | MWLVSLAIVTACAGA |
| Exemplary signal sequence | 1478 | MFVFLVLLPLVSSQC |
| husec Signal peptide | 1479 | MRVMAPRTLILLLSGALALTETWAGS |
| husec3 Signal peptide | 1480 | MEFGLSWLFLVAILKGVQC |

### 2. 5′ Cap

[0596] A structural feature of mRNAs is cap structure at five-prime end (5′). Natural eukaryotic mRNA comprises a 7-methylguanosine cap linked to the mRNA via a 5′ to 5′-triphosphate bridge resulting in cap0 structure (m7GpppN). In most eukaryotic mRNA and some viral mRNA, further modifications can occur at the 2′-hydroxy-group (2′-OH) (e.g., the 2′-hydroxyl group may be methylated to form 2′-O-Me) of the first and subsequent nucleotides producing “cap1” and “cap2” five-prime ends, respectively). Diamond, et al., (2014) Cytokine & growth Factor Reviews, 25:543-550 reported that cap0-mRNA cannot be translated as efficiently as cap1-mRNA in which the role of 2′-O-Me in the penultimate position at the mRNA 5′ end is determinant. Lack of the 2′-O-met has been shown to trigger innate immunity and activate IFN response. Daffis, et al. (2010) Nature, 468:452-456; and Zust et al. (2011) Nature Immunology, 12:137-143.

[0597] RNA capping is well researched and is described, e.g., in Decroly E et al. (2012) Nature Reviews 10: 51-65; and in Ramanathan A. et al., (2016) Nucleic Acids Res; 44(16): 7511-7526, the entire contents of each of which is hereby incorporated by reference. For example, in some embodiments, a 5′-cap structure which may be suitable in the context of the present invention is a cap0 (methylation of the first nucleobase, e.g. m7GpppN), cap1 (additional methylation of the ribose of the adjacent nucleotide of m7GpppN), cap2 (additional methylation of the ribose of the 2nd nucleotide downstream of the m7GpppN), cap3 (additional methylation of the ribose of the 3rd nucleotide downstream of the m7GpppN), cap4 (additional methylation of the ribose of the 4th nucleotide downstream of the m7GpppN), ARCA (“anti-reverse cap analogue”), modified ARCA (e.g. phosphothioate modified ARCA), inosine, N1-methyl-guanosine, 2′-fluoro-guanosine, 7-deaza-guanosine, 8-oxoguanosine, 2-amino-guanosine, LNA-guanosine, and 2-azido-guanosine.

[0598] The term “5′-cap” as used herein refers to a structure found on the 5′-end of an RNA, e.g., mRNA, and generally includes a guanosine nucleotide connected to an RNA, e.g., mRNA, via a 5′- to 5′-triphosphate linkage (also referred to as Gppp or G(5′)ppp(5′)). In some embodiments, a guanosine nucleoside included in a 5′ cap may be modified, for example, by methylation at one or more positions (e.g., at the 7-position) on a base (guanine), and/or by methylation at one or more positions of a ribose. In some embodiments, a guanosine nucleoside included in a 5′ cap comprises a 3′O methylation at a ribose (3′OMeG). In some embodiments, a guanosine nucleoside included in a 5′ cap comprises methylation at the 7-position of guanine (m7G). In some embodiments, a guanosine nucleoside included in a 5′ cap comprises methylation at the 7-position of guanine and a 3′O methylation at a ribose (m7(3′OMeG)). It will be understood that the notation used in the above paragraph, e.g., “(m₂^{7,3′-O})G” or “m7(3′OMeG)”, applies to other structures described herein.

[0599] In some embodiments, providing an RNA with a 5′-cap disclosed herein may be achieved by in vitro transcription, in which a 5′-cap is co-transcriptionally expressed into an RNA strand, or may be attached to an RNA post-transcriptionally using capping enzymes. In some embodiments, co-transcriptional capping with a cap disclosed improves the capping efficiency of an RNA compared to co-transcriptional capping with an appropriate reference comparator. In some embodiments, improving capping efficiency can increase a translation efficiency and/or translation rate of an RNA, and/or increase expression of an encoded polypeptide. In some embodiments, alterations to polynucleotides generates a non-hydrolyzable cap structure which can, for example, prevent decapping and increase RNA half-life.

[0600] In some embodiments, a utilized 5′ caps is a cap0, a cap1, or cap2 structure. See, e.g., Fig. 1 of Ramanathan A et al., and Fig. 1 of Decroly E et al., each of which is incorporated herein by reference in its entirety. See, e.g., Fig. 1 of Ramanathan A et al., and Fig. 1 of Decroly E et al., each of which is incorporated herein by reference in its entirety. In some embodiments, an RNA described herein comprises a cap1 structure. In some embodiments, an RNA described herein comprises a cap2.

[0601] In some embodiments, an RNA described herein comprises a cap0 structure. In some embodiments, a cap0 structure comprises a guanosine nucleoside methylated at the 7-position of guanine ((m⁷)G). In some embodiments, such a cap0 structure is connected to an RNA via a 5′- to 5′-triphosphate linkage and is also referred to herein as (m⁷)Gppp. In some embodiments, a cap0 structure comprises a guanosine nucleoside methylated at the 2′-position of the ribose of guanosine In some embodiments, a cap0 structure comprises a guanosine nucleoside methylated at the 3′-position of the ribose of guanosine. In some embodiments, a guanosine nucleoside included in a 5′ cap comprises methylation at the 7-position of guanine and at the 2′-position of the ribose ((m₂^{7,2′-O})G). In some embodiments, a guanosine nucleoside included in a 5′ cap comprises methylation at the 7-position of guanine and at the 2′-position of the ribose ((m₂^{7,3′-O})G).

[0602] In some embodiments, a cap1 structure comprises a guanosine nucleoside methylated at the 7-position of guanine ((m⁷)G) and optionally methylated at the 2′ or 3′ position pf the ribose, and a 2′O methylated first nucleotide in an RNA ((m^{2′-O})N₁). In some embodiments, a cap1 structure comprises a guanosine nucleoside methylated at the 7-position of guanine ((m⁷)G) and the 3′ position of the ribose, and a 2′O methylated first nucleotide in an RNA ((m^{2′-O})N₁). In some embodiments, a cap1 structure is connected to an RNA via a 5′- to 5′-triphosphate linkage and is also referred to herein as, e.g., ((m⁷)Gppp(^{2′-O})N₁) or (m₂^{7,3′-O})Gppp(^{2′-O})N₁), wherein N₁ is as defined and described herein. In some embodiments, a cap1 structure comprises a second nucleotide, N₂, which is at position 2 and is chosen from A, G, C, or U, e.g., (m⁷)Gppp(^{2′-O})N₁pN₂ or (m₂^{7,3′-O})Gppp(^{2′-O})N₁pN₂, wherein each of N₁ and N₂ is as defined and described herein.

[0603] In some embodiments, a cap2 structure comprises a guanosine nucleoside methylated at the 7-position of guanine ((m⁷)G) and optionally methylated at the 2′ or 3′ position pf the ribose, and a 2′O methylated first and second nucleotides in an RNA ((m^{2′-O})N₁p(m^{2′-O})N₂). In some embodiments, a cap2 structure comprises a guanosine nucleoside methylated at the 7-position of guanine ((m⁷)G) and the 3′ position of the ribose, and a 2′O methylated first and second nucleotide in an RNA. In some embodiments, a cap2 structure is connected to an RNA via a 5′- to 5′-triphosphate linkage and is also referred to herein as, e.g., ((m⁷)Gppp(^{2′-O})N₁p(^{2′-O})N₂) or (m₂^{7,3′-O})Gppp(^{2′-O})N₁p(^{2′-O})N₂), wherein each of N₁ and N₂ is as defined and described herein.

[0604] In some embodiments, the 5′ cap is a dinucleotide cap structure. In some embodiments, the 5′ cap is a dinucleotide cap structure comprising N₁, wherein N₁ is as defined and described herein. In some embodiments, the 5′ cap is a dinucleotide cap G*N₁, wherein N₁ is as defined above and herein, and G* comprises a structure of formula (I):

[chemical structure]

[0605] or a salt thereof,
[0606] wherein
   [0607] each R² and R³ is —OH or —OCH₃; and
   [0608] X is O or S.

[0609] In some embodiments, R² is —OH. In some embodiments, R² is —OCH₃. In some embodiments, R³ is —OH. In some embodiments, R³ is —OCH₃. In some embodiments, R² is —OH and R³ is —OH. In some embodiments, R² is —OH and R³ is —CH₃. In some embodiments, R² is —CH₃ and R³ is —OH. In some embodiments, R² is —CH₃ and R³ is —CH₃.

[0610] In some embodiments, X is O. In some embodiments, X is S.

[0611] In some embodiments, the 5′ cap is a dinucleotide cap0 structure (e.g., (m⁷)GpppN₁, (m₂^{7,2′-O})GpppN₁, (m₂^{7,3′-O})GpppN₁, (m⁷)GppSpN₁, (m₂^{7,3′-O})GppSpN₁, or (m₂^{7,3′}-O)GppSpN₁), wherein N₁ is as defined and described herein. In some embodiments, the 5′ cap is a dinucleotide cap0 structure (e.g., (m⁷)GpppN₁, (m₂^{7,2′-O})GpppN₁, (m₂^{7,3′-O})GpppN₁, (m⁷)GppSpN₁, (m₂^{7,2′-O})GppSpN₁, or (m₂^{7,3′}-O)GppSpN₁), wherein N₁ is G. In some embodiments, the 5′ cap is a dinucleotide cap0 structure (e.g., (m⁷)GpppN₁, (m₂^{7,2′-O})GpppN₁, (m₂^{7,3′-O})GpppN₁, (m⁷)GppSpN₁, (m₂^{7,2′-O})GppSpN₁, or (m₂^{7,3′-O})GppSpN₁), wherein N₁ is A, U, or C. In some embodiments, the 5′ cap is a dinucleotide cap1 structure (e.g., (m⁷)Gppp(m^{2′-O})N₁, (m₂^{7,2′-O}Gppp(m^{2′-O})N₁, (m₂^{7,3′-O})Gppp(m^{2′-O})N₁, (m⁷)GppSp(m^{2′-O})N₁, (m₂^{7,2′-O}GppSp(m^{2′-O})N₁, or (m₂^{7,3′-O})GppSp(m^{2′-O})N₁), wherein N₁ is as defined and described herein. In some embodiments, the 5′ cap is selected from the group consisting of (m⁷)GpppG (“Ecap0”), (m⁷)Gppp(m^{2′-O})G (“Ecap1”), (m₂^{7,3′-O})GpppG (“ARCA” or “D1”), and (m₂^{7,2′-O})GppSpG (“beta-S-ARCA”). In some embodiments, the 5′ cap is (m⁷)GpppG (“Ecap0”), having a structure:

[chemical structure]

[0612] or a salt thereof.

[0613] In some embodiments, the 5′ cap is (m⁷)Gppp(m^{2′-O})G (“Ecap1”), having a structure:

[chemical structure]

[0614] or a salt thereof.

[0615] In some embodiments, the 5′ cap is (m₂^{7,3′-O})GpppG (“ARCA” or “D1”), having a structure:

[chemical structure]

[0616] or a salt thereof.

[0617] In some embodiments, the 5′ cap is (m₂^{7,2′-O})GppSpG (“beta-S-ARCA”), having a structure:

[chemical structure]

[0618] or a salt thereof.

[0619] In some embodiments, the 5′ cap is a trinucleotide cap structure. In some embodiments, the 5′ cap is a trinucleotide cap structure comprising N₁pN₂, wherein N₁ and N₂ are as defined and described herein. In some embodiments, the 5′ cap is a dinucleotide cap G*N₁pN₂, wherein N₁ and N₂ are as defined above and herein, and G* comprises a structure of formula (I):

[chemical structure]

[0620] or a salt thereof, wherein R², R³, and X are as defined and described herein.

[0621] In some embodiments, the 5′ cap is a trinucleotide cap0 structure (e.g. (m⁷)GpppN₁pN₂, (m₂^{7,2′-O})GpppN₁pN₂, or (m₂^{7,3′-O})GpppN₁pN₂), wherein N₁ and N₂ are as defined and described herein). In some embodiments, the 5′ cap is a trinucleotide cap1 structure (e.g., (m⁷)Gppp(m^{2′-O})N₁pN₂, (m₂^{7,3′-O})Gppp(m^{2′-O})N₁pN₂, (m₂^{7,3′-O})Gppp(m^{2′-O})N₁pN₂), wherein N₁ and N₂ are as defined and described herein. In some embodiments, the 5′ cap is a trinucleotide cap2 structure (e.g., (m⁷)Gppp(m^{2′-O})N₁p(m^{2′-O})N₂, (m₂^{7,3′-O})Gppp(m^{2′-O})N₁p(m^{2′-O})N₂, (m₂^{7,3′-O})Gppp(m^{2′-O})N₁p(m^{2′-O})N₂), wherein N₁ and N₂ are as defined and described herein. In some embodiments, the 5′ cap is selected from the group consisting of (m₂^{7,3′-O})Gppp(m^{2′-O})ApG (“CleanCap AG”, “CC413”), (m₂^{7,3′-O})Gppp(m^{2′-O})GpG (“CleanCap GG”), (m⁷)Gppp(m^{2′-O})ApG, (m⁷)Gppp(m^{2′-O})GpG, (m₂^{7,3′-O})Gppp(m₂^{6,2′-O})ApG, and (m⁷)Gppp(m^{2′-O})ApU.

[0622] In some embodiments, the 5′ cap is (m₂^{7,3′-O})Gppp(m^{2′-O})ApG (“CleanCap AG”, “CC413”), having a structure:

[chemical structure]

[0623] or a salt thereof.

[0624] In some embodiments, the 5′ cap is (m₂^{7,3′-O})Gppp(m^{2′-O})GpG (“CleanCap GG”), having a structure:

[chemical structure]

[0625] or a salt thereof.

[0626] In some embodiments, the 5′ cap is (m⁷)Gppp(m^{2′-O})ApG, having a structure:

[chemical structure]

[0627] or a salt thereof.

[0628] In some embodiments, the 5′ cap is (m⁷)Gppp(m^{2′-O})GpG, having a structure:

[chemical structure]

[0629] or a salt thereof.

[0630] In some embodiments, the 5′ cap is (m₂^{7,3′-O})Gppp(m₂^{6,2′-O})ApG, having a structure:

[chemical structure]

[0631] or a salt thereof.

[0632] In some embodiments, the 5′ cap is (m⁷)Gppp(m^{2′-O})ApU, having a structure:

[chemical structure]

[0633] or a salt thereof.

[0634] In some embodiments, the 5′ cap is a tetranucleotide cap structure. In some embodiments, the 5′ cap is a tetranucleotide cap structure comprising N₁pN₂pN₃, wherein N₁, N₂, and N₃ are as defined and described herein. In some embodiments, the 5′ cap is a tetranucleotide cap G*N₁pN₂pN₃, wherein N₁, N₂, and N₃ are as defined above and herein, and G* comprises a structure of formula (I):

[chemical structure]

[0635] or a salt thereof, wherein R², R³, and X are as defined and described herein.

[0636] In some embodiments, the 5′ cap is a tetranucleotide cap0 structure (e.g. (m⁷)GpppN₁pN₂pN₃, (m₂^{7,3′-O})GpppN₁pN₂pN₃, or (m₂^{7,3′-O})GpppN₁N2pN₃), wherein N₁, N₂, and N₃ are as defined and described herein). In some embodiments, the 5′ cap is a tetranucleotide Cap1 structure (e.g., (m⁷)Gppp(m^{2′-O})N₁pN₂pN₃, (m₂^{7,2′-O})Gppp(m^{2′-O})N₁pN₂pN₃, (m₂^{7,3′-O})Gppp(m^{2′-O})N₁pN₂N₃), wherein N₁, N₂, and N₃ are as defined and described herein. In some embodiments, the 5′ cap is a tetranucleotide Cap2 structure (e.g., (m⁷)Gppp(m^{2′-O})N₁p(m^{2′-O})N₂pN₃, (m₂^{7,2′-O})Gppp(m^{2′-O})N₁p(m^{2′-O})N₂pN₃, (m₂^{7,3′-O})Gppp(m^{2′-O})N₁p(m^{2′-O})N₂pN₃), wherein N₁, N₂, and N₃ are as defined and described herein. In some embodiments, the 5′ cap is selected from the group consisting of (m₂^{7,3′-O})Gppp(m^{2′-O})Ap(m^{2′-O})GpG, (m₂^{7,3′-O})Gppp(m^{2′-O})Gp(m^{2′-O})GpC, (m⁷)Gppp(m^{2′-O})Ap(m^{2′-O})UpA, and (m⁷)Gppp(m^{2′-O})Ap(m^{2′-O})GpG.

[0637] In some embodiments, the 5′ cap is (m₂^{7,3′-O})Gppp(m^{2′-O})Ap(m^{2′-O})GpG, having a structure:

[chemical structure]

[0638] or a salt thereof.

[0639] In some embodiments, the 5′ cap is (m₂^{7,3′-O})Gppp(m^{2′-O})Gp(m^{2′-O})GpC, having a structure:

[chemical structure]

[0640] or a salt thereof.

[0641] In some embodiments, the 5′ cap is (m⁷)Gppp(m^{2′-O})Ap(m^{2′-O})UpA, having a structure:

[chemical structure]

[0642] or a salt thereof.

[0643] In some embodiments, the 5′ cap is (m⁷)Gppp(m^{2′-O})Ap(m^{2′-O})GpG, having a structure:

[chemical structure]

[0644] or a salt thereof.

### 3. Cap Proximal Sequences

[0645] In some embodiments, a 5′ UTR utilized in accordance with the present disclosure comprises a cap proximal sequence, e.g., as disclosed herein. In some embodiments, a cap proximal sequence comprises a sequence adjacent to a 5′ cap. In some embodiments, a cap proximal sequence comprises nucleotides in positions +1, +2, +3, +4, and/or +5 of an RNA polynucleotide.

[0646] In some embodiments, a cap structure comprises one or more polynucleotides of a cap proximal sequence. In some embodiments, a cap structure comprises an m⁷ Guanosine cap and nucleotide+1 (N₁) of an RNA polynucleotide. In some embodiments, a cap structure comprises an m⁷ Guanosine cap and nucleotide+2 (N₂) of an RNA polynucleotide. In some embodiments, a cap structure comprises an m⁷ Guanosine cap and nucleotides+1 and +2 (N₁ and N₂) of an RNA polynucleotide. In some embodiments, a cap structure comprises an m⁷ Guanosine cap and nucleotides+1, +2, and +3 (N₁, N₂, and N₃) of an RNA polynucleotide.

[0647] Those skilled in the art, reading the present disclosure, will appreciate that, in some embodiments, one or more residues of a cap proximal sequence (e.g., one or more of residues+1, +2, +3, +4, and/or +5) may be included in an RNA by virtue of having been included in a cap entity (e.g., a cap1 or cap2 structure, etc.); alternatively, in some embodiments, at least some of the residues in a cap proximal sequence may be enzymatically added (e.g., by a polymerase such as a T7 polymerase). For example, in certain exemplified embodiments where a m₂^{7,3′-O}Gppp(m₁^{2′-O})ApG cap is utilized, +1 (i.e., N₁) and +2 (i.e. N₂) are the (m₁^{2′-O})A and G residues of the cap, and +3, +4, and +5 are added by polymerase (e.g., T7 polymerase).

[0648] In some embodiments, the 5′ cap is a dinucleotide cap structure, wherein the cap proximal sequence comprises N₁ of the 5′ cap, where N₁ is any nucleotide, e.g., A, C, G or U. In some embodiments, the 5′ cap is a trinucleotide cap structure (e.g., the trinucleotide cap structures described above and herein), wherein the cap proximal sequence comprises N₁ and N₂ of the 5′ cap, wherein N₁ and N₂ are independently any nucleotide, e.g., A, C, G or U. In some embodiments, the 5′ cap is a tetranucleotide cap structure (e.g., the trinucleotide cap structures described above and herein), wherein the cap proximal sequence comprises N₁, N₂, and N₃ of the 5′ cap, wherein N₁, N₂, and N₃ are any nucleotide, e.g., A, C, G or U.

[0649] In some embodiments, e.g., where the 5′ cap is a dinucleotide cap structure, a cap proximal sequence comprises N₁ of a the 5′ cap, and N₂, N₃, N₄ and N₅, wherein N₁ to N₅ correspond to positions +1, +2, +3, +4, and/or +5 of an RNA polynucleotide. In some embodiments, e.g., where the 5′ cap is a trinucleotide cap structure, a cap proximal sequence comprises N₁ and N₂ of a the 5′ cap, and N₃, N₄ and N₅, wherein N₁ to N₅ correspond to positions +1, +2, +3, +4, and/or +5 of an RNA polynucleotide. In some embodiments, e.g., where the 5′ cap is a tetranucleotide cap structure, a cap proximal sequence comprises N₁, N₂, and N₃ of a the 5′ cap, and N₄ and N₅, wherein N₁ to N₅ correspond to positions +1, +2, +3, +4, and/or +5 of an RNA polynucleotide.

[0650] In some embodiments, N₁ is A. In some embodiments, N₁ is C. In some embodiments, N₁ is G. In some embodiments, N₁ is U. In some embodiments, N₂ is A. In some embodiments, N₂ is C. In some embodiments, N₂ is G. In some embodiments, N₂ is U. In some embodiments, N₃ is A. In some embodiments, N₃ is C. In some embodiments, N₃ is G. In some embodiments, N₃ is U. In some embodiments, N₄ is A. In some embodiments, N₄ is C. In some embodiments, N₄ is G. In some embodiments, N₄ is U. In some embodiments, N₅ is A. In some embodiments, N₅ is C. In some embodiments, N₅ is G. In some embodiments, N₅ is U. It will be understood that each of the embodiments described above and herein (e.g., for N₁ through N₅) may be taken singly or in combination and/or may be combined with other embodiments of variables described above and herein (e.g., 5′ caps).

### 4. 5′ UTR

[0651] In some embodiments, a nucleic acid (e.g., DNA, RNA) utilized in accordance with the present disclosure a 5′-UTR. In some embodiments, 5′-UTR may comprise a plurality of distinct sequence elements; in some embodiments, such plurality may be or comprise multiple copies of one or more particular sequence elements (e.g., as may be from a particular source or otherwise known as a functional or characteristic sequence element). In some embodiments a 5′ UTR comprises multiple different sequence elements.

[0652] The term “untranslated region” or “UTR” is commonly used in the art to a region in a DNA molecule which is transcribed but is not translated into an amino acid sequence, or to the corresponding region in an RNA polynucleotide, such as an mRNA molecule. An untranslated region (UTR) can be present 5′ (upstream) of an open reading frame (5′-UTR) and/or 3′ (downstream) of an open reading frame (3′-UTR). As used herein, the terms “five prime untranslated region” or “5′ UTR” refer to a sequence of a polyribonucleotide between the 5′ end of the polyribonucleotide (e.g., a transcription start site) and a start codon of a coding region of the polyribonucleotide. In some embodiments, “5′ UTR” refers to a sequence of a polyribonucleotide that begins at the 5′ end of the polyribonucleotide (e.g., a transcription start site) and ends one nucleotide (nt) before a start codon (usually AUG) of a coding region of the polyribonucleotide, e.g., in its natural context. In some embodiments, a 5′ UTR comprises a Kozak sequence. A 5′-UTR is downstream of the 5′-cap (if present), e.g., directly adjacent to the 5′-cap. In some embodiments, a 5′ UTR disclosed herein comprises a cap proximal sequence, e.g., as defined and described herein. In some embodiments, a cap proximal sequence comprises a sequence adjacent to a 5′ cap.

[0653] Exemplary 5′ UTRs include a human alpha globin (hAg) 5′UTR or a fragment thereof, a TEV 5′ UTR or a fragment thereof, a HSP70 5′ UTR or a fragment thereof, or a c-Jun 5′ UTR or a fragment thereof.

[0654] In some embodiments, an RNA disclosed herein comprises a hAg 5′ UTR or a fragment thereof.

[0655] In some embodiments, an RNA disclosed herein comprises a 5′ UTR having at least 80%, at least 85%, at least 90%, at least 95%, at least 96%, at least 97%, at least 98%, or at least 99% identity to a 5′ UTR with the sequence according to SEQ ID NO: 10. In some embodiments, an RNA disclosed herein comprises a 5′ UTR provided in SEQ ID NO: 10.

### 5. PolyA Tail

[0656] In some embodiments, a polynucleotide (e.g., DNA, RNA) disclosed herein comprises a polyadenylate (polyA) sequence, e.g., as described herein. In some embodiments, a polyA sequence is situated downstream of a 3′-UTR, e.g., adjacent to a 3′-UTR.

[0657] As used herein, the term “poly(A) sequence” or “poly-A tail” refers to an uninterrupted or interrupted sequence of adenylate residues which is typically located at the 3′-end of an RNA polynucleotide. Poly(A) sequences are known to those of skill in the art and may follow the 3′-UTR in the RNAs described herein. An uninterrupted poly(A) sequence is characterized by consecutive adenylate residues. In nature, an uninterrupted poly(A) sequence is typical. In some embodiments, polynucleotides disclosed herein comprise an uninterrupted Poly(A) sequence. In some embodiments, polynucleotides disclosed herein comprise interrupted Poly(A) sequence. In some embodiments, RNAs disclosed herein can have a poly(A) sequence attached to the free 3′-end of the RNA by a template-independent RNA polymerase after transcription or a poly(A) sequence encoded by DNA and transcribed by a template-dependent RNA polymerase.

[0658] It has been demonstrated that a poly(A) sequence of about 120 A nucleotides has a beneficial influence on the levels of RNA in transfected eukaryotic cells, as well as on the levels of protein that is translated from an open reading frame that is present upstream (5′) of the poly(A) sequence (Holtkamp et al., 2006, Blood, vol. 108, pp. 4009-4017, which is herein incorporated by reference).

[0659] In some embodiments, a poly(A) sequence (e.g., SEQ ID NO: 1483) in accordance with the present disclosure is not limited to a particular length; in some embodiments, a poly(A) sequence is any length. In some embodiments, a poly(A) sequence comprises, essentially consists of, or consists of at least 20, at least 30, at least 40, at least 80, or at least 100 and up to 500, up to 400, up to 300, up to 200, or up to 150 A nucleotides, and, in particular, about 120 A nucleotides. In this context, “essentially consists of” means that most nucleotides in the poly(A) sequence, typically at least 75%, at least 80%, at least 85%, at least 90%, at least 95%, at least 96%, at least 97%, at least 98%, or at least 99% by number of nucleotides in the poly(A) sequence are A nucleotides, but permits that remaining nucleotides are nucleotides other than A nucleotides, such as U nucleotides (uridylate), G nucleotides (guanylate), or C nucleotides (cytidylate). In this context, “consists of” means that all nucleotides in the poly(A) sequence, i.e., 100% by number of nucleotides in the poly(A) sequence, are A nucleotides. The term “A nucleotide” or “A” refers to adenylate.

[0660] In some embodiments, a poly(A) sequence is attached during RNA transcription, e.g., during preparation of in vitro transcribed RNA, based on a DNA template comprising repeated dT nucleotides (deoxythymidylate) in the strand complementary to the coding strand. The DNA sequence encoding a poly(A) sequence (coding strand) is referred to as poly(A) cassette.

[0661] In some embodiments, the poly(A) cassette present in the coding strand of DNA essentially consists of dA nucleotides, but is interrupted by a random sequence of the four nucleotides (dA, dC, dG, and dT). Such random sequence may be 5 to 50, 10 to 30, or 10 to 20 nucleotides in length. Such a cassette is disclosed in WO 2016/005324 A1, hereby incorporated by reference. Any poly(A) cassette disclosed in WO 2016/005324 A1 may be used in accordance with the present disclosure. A poly(A) cassette that essentially consists of dA nucleotides, but is interrupted by a random sequence having an equal distribution of the four nucleotides (dA, dC, dG, dT) and having a length of e.g., 5 to 50 nucleotides shows, on DNA level, constant propagation of plasmid DNA in E. coli and is still associated, on RNA level, with the beneficial properties with respect to supporting RNA stability and translational efficiency is encompassed. In some embodiments, the poly(A) sequence contained in an RNA polynucleotide described herein essentially consists of A nucleotides, but is interrupted by a random sequence of the four nucleotides (A, C, G, U). Such random sequence may be 5 to 50, 10 to 30, or 10 to 20 nucleotides in length.

[0662] In some embodiments, no nucleotides other than A nucleotides flank a poly(A) sequence at its 3′-end, i.e., the poly(A) sequence is not masked or followed at its 3′-end by a nucleotide other than A.

[0663] In some embodiments, the poly(A) sequence may comprise at least 20, at least 30, at least 40, at least 80, or at least 100 and up to 500, up to 400, up to 300, up to 200, or up to 150 nucleotides. In some embodiments, the poly (A) sequence may essentially consist of at least 20, at least 30, at least 40, at least 80, or at least 100 and up to 500, up to 400, up to 300, up to 200, or up to 150 nucleotides. In some embodiments, the poly(A) sequence may consist of at least 20, at least 30, at least 40, at least 80, or at least 100 and up to 500, up to 400, up to 300, up to 200, or up to 150 nucleotides. In some embodiments, the poly(A) sequence comprises at least 100 nucleotides. In some embodiments, the poly(A) sequence comprises about 150 nucleotides. In some embodiments, the poly(A) sequence comprises about 120 nucleotides.

[0664] In some embodiments, a poly A tail comprises a specific number of Adenosines, such as about 50 or more, about 60 or more, about 70 or more, about 80 or more, about 90 or more, about 100 or more, about 120, or about 150 or about 200. In some embodiments a poly A tail of a string construct may comprise 200 A residues or less. In some embodiments, a poly A tail of a string construct may comprise about 200 A residues. In some embodiments, a poly A tail of a string construct may comprise 180 A residues or less. In some embodiments, a poly A tail of a string construct may comprise about 180 A residues. In some embodiments, a poly A tail may comprise 150 residues or less.

[0665] In some embodiments, RNA comprises a poly(A) sequence comprising the nucleotide sequence of SEQ ID NO: 16, or a nucleotide sequence having at least 99%, 98%, 97%, 96%, 95%, 90%, 85%, or 80% identity to the nucleotide sequence of SEQ ID NO: 16. In some embodiments, a poly(A) tail comprises a plurality of A residues interrupted by a linker. In some embodiments, a linker comprises the nucleotide sequence GCATATGAC (SEQ ID NO: 1461).

### 6. 3′ UTR

[0666] In some embodiments, an RNA utilized in accordance with the present disclosure comprises a 3′-UTR. As used herein, the terms “three prime untranslated region,” “3′ untranslated region,” or “3′ UTR” refer to a sequence of an mRNA molecule that begins following a stop codon of a coding region of an open reading frame sequence. In some embodiments, the 3′ UTR begins immediately after a stop codon of a coding region of an open reading frame sequence, e.g., in its natural context. In other embodiments, the 3′ UTR does not begin immediately after stop codon of the coding region of an open reading frame sequence, e.g., in its natural context. The term “3′-UTR” does preferably not include the poly(A) sequence. Thus, the 3′-UTR is upstream of the poly(A) sequence (if present), e.g., directly adjacent to the poly(A) sequence.

[0667] In some embodiments, an RNA disclosed herein comprises a 3′ UTR comprising an F element and/or an I element. In some embodiments, a 3′ UTR or a proximal sequence thereto comprises a restriction site. In some embodiments, a restriction site is a BamHI site. In some embodiments, a restriction site is a XhoI site.

[0668] In some embodiments, an RNA construct comprises an F element. In some embodiments, an F element sequence is a 3′-UTR of amino-terminal enhancer of split (AES).

[0669] In some embodiments, an RNA disclosed herein comprises a 3′ UTR having at least 80%, at least 85%, at least 90%, at least 95%, at least 96%, at least 97%, at least 98%, or at least 99% identity to a 3′ UTR with the sequence according to SEQ ID NO: 14. In some embodiments, an RNA disclosed herein comprises a 3 UTR provided in SEQ ID NO: 14.

[0670] In some embodiments, a 3′UTR is an FI element as described in WO2017/060314, which is herein incorporated by reference in its entirety.

### 7. Exemplary Polyribonucleotides

[0671] Exemplary polyribonucleotide constructs comprising coding and non-coding elements as described herein are shown in Table 8 below.

TABLE 8
Exemplary polyribonucleotide constructs (Including 5′UTR, 3′UTR and PolyA)

| SEQ ID NO | |
|---|---|
| | IgG Format - Heavy Chain |
| 850 | PGDM1400 VH G1m3 |
| 851 | PGDM1400 VH G1m3 LS |
| 852 | PGDM1400 VH G1m3 cah LS |
| 853 | PGDM1400 VH G1m3 cak LS |
| 854 | PGDM1400 VH G1m3 GAALIE LS |
| 855 | PGDM1400 VH G1m3 GAIE LS |
| 856 | PGDM1400 VH G1m3 GA LS |
| 857 | PGDM1400 VH G1m3 IE LS |
| 858 | PGDM1400 VH G1m3 GAALIE cah LS |
| 859 | PGDM1400 VH G1m3 GAIE cah LS |
| 860 | PGDM1400 VH G1m3 GA cah LS |
| 861 | PGDM1400 VH G1m3 IE cah LS |
| 862 | PGDM1400 VH G1m3 GAALIE cak LS |
| 863 | PGDM1400 VH G1m3 GAIE cak LS |
| 864 | PGDM1400 VH G1m3 GA cak LS |
| 865 | PGDM1400 VH G1m3 IE cak LS |
| 866 | PGDM1400 VH G1m17 |
| 867 | PGDM1400 VH G1m17 LS |
| 868 | PGDM1400 VH G1m17 cah LS |
| 869 | PGDM1400 VH G1m17 cak LS |
| 870 | PGDM1400 VH G1m17 GAALIE LS |
| 871 | PGDM1400 VH G1m17 GAIE LS |
| 872 | PGDM1400 VH G1m17 GA LS |
| 873 | PGDM1400 VH G1m17 IE LS |
| 874 | PGDM1400 VH G1m17 GAALIE cah LS |
| 875 | PGDM1400 VH G1m17 GAIE cah LS |
| 876 | PGDM1400 VH G1m17 GA cah LS |
| 877 | PGDM1400 VH G1m17 IE cah LS |
| 878 | PGDM1400 VH G1m17 GAALIE cak LS |
| 879 | PGDM1400 VH G1m17 GAIE cak LS |
| 880 | PGDM1400 VH G1m17 GA cak LS |
| 881 | PGDM1400 VH G1m17 IE cak LS |
| 882 | PGDM1400 VH G1m17,1 |
| 883 | PGDM1400 VH G1m17,1 LS |
| 884 | PGDM1400 VH G1m17,1 cah LS |
| 885 | PGDM1400 VH G1m17,1 cak LS |
| 886 | PGDM1400 VH G1m17,1 GAALIE LS |
| 887 | PGDM1400 VH G1m17,1 GAIE LS |
| 888 | PGDM1400 VH G1m17,1 GA LS |
| 889 | PGDM1400 VH G1m17,1 IE LS |
| 890 | PGDM1400 VH G1m17,1 GAALIE cah LS |
| 891 | PGDM1400 VH G1m17,1 GAIE cah LS |
| 892 | PGDM1400 VH G1m17,1 GA cah LS |
| 893 | PGDM1400 VH G1m17,1 IE cah LS |
| 894 | PGDM1400 VH G1m17,1 GAALIE cak LS |
| 895 | PGDM1400 VH G1m17,1 GAIE cak LS |
| 896 | PGDM1400 VH G1m17,1 GA cak LS |
| 897 | PGDM1400 VH G1m17,1 IE cak LS |
| | IgG Format - Light Chain |
| 898 | PGDM1400 VL Ck |
| | CrossMabCH1-CLx Format - Heavy Chain |
| 899 | PGDM1400 VH G1m3 Ck(AS/Q124E) del216-220 |
| 900 | PGDM1400 VH G1m3 Ck(AS/Q124E) del216-220 LS |
| 901 | PGDM1400 VH G1m3 Ck(AS/Q124E) del216-220 GAALIE LS |
| 902 | PGDM1400 VH G1m3 Ck(AS/Q124E) del216-220 GAIE LS |
| 903 | PGDM1400 VH G1m3 Ck(AS/Q124E) del216-220 GA LS |
| 904 | PGDM1400 VH G1m3 Ck(AS/Q124E) del216-220 IE LS |
| 905 | PGDM1400 VH G1m3 Ck(AS/Q124E) del216-220 cah LS |
| 906 | PGDM1400 VH G1m3 Ck(AS/Q124E) del216-220 GAALIE cah LS |
| 907 | PGDM1400 VH G1m3 Ck(AS/Q124E) del216-220 GAIE cah LS |
| 908 | PGDM1400 VH G1m3 Ck(AS/Q124E) del216-220 GA cah LS |
| 909 | PGDM1400 VH G1m3 Ck(AS/Q124E) del216-220 IE cah LS |
| 910 | PGDM1400 VH G1m3 Ck(AS/Q124E) del216-220 cak LS |
| 911 | PGDM1400 VH G1m3 Ck(AS/Q124E) del216-220 GAALIE cak LS |
| 912 | PGDM1400 VH G1m3 Ck(AS/Q124E) del216-220 GAIE cak LS |
| 913 | PGDM1400 VH G1m3 Ck(AS/Q124E) del216-220 GA cak LS |
| 914 | PGDM1400 VH G1m3 Ck(AS/Q124E) del216-220 IE cak LS |
| 915 | PGDM1400 VH G1m17 Ck(AS/Q124E) del216-220 |
| 916 | PGDM1400 VH G1m17 Ck(AS/Q124E) del216-220 LS |
| 917 | PGDM1400 VH G1m17 Ck(AS/Q124E) del216-220 GAALIE LS |
| 918 | PGDM1400 VH G1m17 Ck(AS/Q124E) del216-220 GAIE LS |
| 919 | PGDM1400 VH G1m17 Ck(AS/Q124E) del216-220 GA LS |
| 920 | PGDM1400 VH G1m17 Ck(AS/Q124E) del216-220 IE LS |
| 921 | PGDM1400 VH G1m17 Ck(AS/Q124E) del216-220 cah LS |
| 922 | PGDM1400 VH G1m17 Ck(AS/Q124E) del216-220 GAALIE cah LS |
| 923 | PGDM1400 VH G1m17 Ck(AS/Q124E) del216-220 GAIE cah LS |
| 924 | PGDM1400 VH G1m17 Ck(AS/Q124E) del216-220 GA cah LS |
| 925 | PGDM1400 VH G1m17 Ck(AS/Q124E) del216-220 IE cah LS |
| 926 | PGDM1400 VH G1m17 Ck(AS/Q124E) del216-220 cak LS |
| 927 | PGDM1400 VH G1m17 Ck(AS/Q124E) del216-220 GAALIE cak LS |
| 928 | PGDM1400 VH G1m17 Ck(AS/Q124E) del216-220 GAIE cak LS |
| 929 | PGDM1400 VH G1m17 Ck(AS/Q124E) del216-220 GA cak LS |
| 930 | PGDM1400 VH G1m17 Ck(AS/Q124E) del216-220 IE cak LS |
| 931 | PGDM1400 VH G1m17,1 Ck(AS/Q124E) del216-220 |
| 932 | PGDM1400 VH G1m17,1 Ck(AS/Q124E) del216-220 LS |
| 933 | PGDM1400 VH G1m17,1 Ck(AS/Q124E) del216-220 GAALIE LS |
| 934 | PGDM1400 VH G1m17,1 Ck(AS/Q124E) del216-220 GAIE LS |
| 935 | PGDM1400 VH G1m17,1 Ck(AS/Q124E) del216-220 GA LS |
| 936 | PGDM1400 VH G1m17,1 Ck(AS/Q124E) del216-220 IE LS |
| 937 | PGDM1400 VH G1m17,1 Ck(AS/Q124E) del216-220 cah LS |
| 938 | PGDM1400 VH G1m17,1 Ck(AS/Q124E) del216-220 GAALIE cah LS |
| 939 | PGDM1400 VH G1m17,1 Ck(AS/Q124E) del216-220 GAIE cah LS |
| 940 | PGDM1400 VH G1m17,1 Ck(AS/Q124E) del216-220 GA cah LS |
| 941 | PGDM1400 VH G1m17,1 Ck(AS/Q124E) del216-220 IE cah LS |
| 942 | PGDM1400 VH G1m17,1 Ck(AS/Q124E) del216-220 cak LS |
| 943 | PGDM1400 VH G1m17,1 Ck(AS/Q124E) del216-220 GAALIE cak LS |
| 944 | PGDM1400 VH G1m17,1 Ck(AS/Q124E) del216-220 GAIE cak LS |
| 945 | PGDM1400 VH G1m17,1 Ck(AS/Q124E) del216-220 GA cak LS |
| 946 | PGDM1400 VH G1m17,1 Ck(AS/Q124E) del216-220 IE cak LS |
| | CrossMabCH1-CLx Format - Light Chain |
| 947 | PGDM1400 VL CH1(SS) (G1m3) |
| 948 | PGDM1400 VL CH1(SS) (G1m17±,1) |
| | CrossMabCH1-CLcv Format - Heavy Chain |
| 949 | PGDM1400 VH G1m3 K147E + K213D |
| 950 | PGDM1400 VH G1m3 K147E + K213D LS |
| 951 | PGDM1400 VH G1m3 K147E + K213D GAALIE LS |
| 952 | PGDM1400 VH G1m3 K147E + K213D GAIE LS |
| 953 | PGDM1400 VH G1m3 K147E + K213D GA LS |
| 954 | PGDM1400 VH G1m3 K147E + K213D IE LS |
| 955 | PGDM1400 VH G1m3 K147E + K213D cah LS |
| 956 | PGDM1400 VH G1m3 K147E + K213D GAALIE cah LS |
| 957 | PGDM1400 VH G1m3 K147E + K213D GAIE cah LS |
| 958 | PGDM1400 VH G1m3 K147E + K213D GA cah LS |
| 959 | PGDM1400 VH G1m3 K147E + K213D IE cah LS |
| 960 | PGDM1400 VH G1m3 K147E + K213D cak LS |
| 961 | PGDM1400 VH G1m3 K147E + K213D GAALIE cak LS |
| 962 | PGDM1400 VH G1m3 K147E + K213D GAIE cak LS |
| 963 | PGDM1400 VH G1m3 K147E + K213D GA cak LS |
| 964 | PGDM1400 VH G1m3 K147E + K213D IE cak LS |
| 965 | PGDM1400 VH G1m17 K147E + K213D |
| 966 | PGDM1400 VH G1m17 K147E + K213D LS |
| 967 | PGDM1400 VH G1m17 K147E + K213D GAALIE LS |
| 968 | PGDM1400 VH G1m17 K147E + K213D GAIE LS |
| 969 | PGDM1400 VH G1m17 K147E + K213D GA LS |
| 970 | PGDM1400 VH G1m17 K147E + K213D IE LS |
| 971 | PGDM1400 VH G1m17 K147E + K213D cah LS |
| 972 | PGDM1400 VH G1m17 K147E + K213D GAALIE cah LS |
| 973 | PGDM1400 VH G1m17 K147E + K213D GAIE cah LS |
| 974 | PGDM1400 VH G1m17 K147E + K213D GA cah LS |
| 975 | PGDM1400 VH G1m17 K147E + K213D IE cah LS |
| 976 | PGDM1400 VH G1m17 K147E + K213D cak LS |
| 977 | PGDM1400 VH G1m17 K147E + K213D GAALIE cak LS |
| 978 | PGDM1400 VH G1m17 K147E + K213D GAIE cak LS |
| 979 | PGDM1400 VH G1m17 K147E + K213D GA cak LS |
| 980 | PGDM1400 VH G1m17 K147E + K213D IE cak LS |
| 981 | PGDM1400 VH G1m17,1 K147E + K213D |
| 982 | PGDM1400 VH G1m17,1 K147E + K213D LS |
| 983 | PGDM1400 VH G1m17,1 K147E + K213D GAALIE LS |
| 984 | PGDM1400 VH G1m17,1 K147E + K213D GAIE LS |
| 985 | PGDM1400 VH G1m17,1 K147E + K213D GA LS |
| 986 | PGDM1400 VH G1m17,1 K147E + K213D IE LS |
| 987 | PGDM1400 VH G1m17,1 K147E + K213D cah LS |
| 988 | PGDM1400 VH G1m17,1 K147E + K213D GAALIE cah LS |
| 989 | PGDM1400 VH G1m17,1 K147E + K213D GAIE cah LS |
| 990 | PGDM1400 VH G1m17,1 K147E + K213D GA cah LS |
| 991 | PGDM1400 VH G1m17,1 K147E + K213D IE cah LS |
| 992 | PGDM1400 VH G1m17,1 K147E + K213D cak LS |
| 993 | PGDM1400 VH G1m17,1 K147E + K213D GAALIE cak LS |
| 994 | PGDM1400 VH G1m17,1 K147E + K213D GAIE cak LS |
| 995 | PGDM1400 VH G1m17,1 K147E + K213D GA cak LS |
| 996 | PGDM1400 VH G1m17,1 K147E + K213D IE cak LS |
| | CrossMabCH1-CLv Format - Light Chain |
| 997 | PGDM1400 VL E123K + Q124R |
| 998 | PGDM1400 VL E123R + Q124K |
| | scFv-Fc Format |
| 999 | PGDM1400 VH-(G4S)4-VL G1m3 CH1del C220S |
| 1000 | PGDM1400 VH-(G4S)4-VL G1m3 CH1del C220S LS |
| 1001 | PGDM1400 VH-(G4S)4-VL G1m3 CH1del C220S GAALIE LS |
| 1002 | PGDM1400 VH-(G4S)4-VL G1m3 CH1del C220S GAIE LS |
| 1003 | PGDM1400 VH-(G4S)4-VL G1m3 CH1del C220S GA LS |
| 1004 | PGDM1400 VH-(G4S)4-VL G1m3 CH1del C220S IE LS |
| 1005 | PGDM1400 VH-(G4S)4-VL G1m3 CH1del C220S cah LS |
| 1006 | PGDM1400 VH-(G4S)4-VL G1m3 CH1del C220S GAALIE cah LS |
| 1007 | PGDM1400 VH-(G4S)4-VL G1m3 CH1del C220S GAIE cah LS |
| 1008 | PGDM1400 VH-(G4S)4-VL G1m3 CH1del C220S GA cah LS |
| 1009 | PGDM1400 VH-(G4S)4-VL G1m3 CH1del C220S IE cah LS |
| 1010 | PGDM1400 VH-(G4S)4-VL G1m3 CH1del C220S cak LS |
| 1011 | PGDM1400 VH-(G4S)4-VL G1m3 CH1del C220S GAALIE cak LS |
| 1012 | PGDM1400 VH-(G4S)4-VL G1m3 CH1del C220S GAIE cak LS |
| 1013 | PGDM1400 VH-(G4S)4-VL G1m3 CH1del C220S GA cak LS |
| 1014 | PGDM1400 VH-(G4S)4-VL G1m3 CH1del C220S IE cak LS |
| 1015 | PGDM1400 VH-(G4S)4-VL G1m17 CH1del C220S |
| 1016 | PGDM1400 VH-(G4S)4-VL G1m17 CH1del C220S LS |
| 1017 | PGDM1400 VH-(G4S)4-VL G1m17 CH1del C220S GAALIE LS |
| 1018 | PGDM1400 VH-(G4S)4-VL G1m17 CH1del C220S GAIE LS |
| 1019 | PGDM1400 VH-(G4S)4-VL G1m17 CH1del C220S GA LS |
| 1020 | PGDM1400 VH-(G4S)4-VL G1m17 CH1del C220S IE LS |
| 1021 | PGDM1400 VH-(G4S)4-VL G1m17 CH1del C220S cah LS |
| 1022 | PGDM1400 VH-(G4S)4-VL G1m17 CH1del C220S GAALIE cah LS |
| 1023 | PGDM1400 VH-(G4S)4-VL G1m17 CH1del C220S GAIE cah LS |
| 1024 | PGDM1400 VH-(G4S)4-VL G1m17 CH1del C220S GA cah LS |
| 1025 | PGDM1400 VH-(G4S)4-VL G1m17 CH1del C220S IE cah LS |
| 1026 | PGDM1400 VH-(G4S)4-VL G1m17 CH1del C220S cak LS |
| 1027 | PGDM1400 VH-(G4S)4-VL G1m17 CH1del C220S GAALIE cak LS |
| 1028 | PGDM1400 VH-(G4S)4-VL G1m17 CH1del C220S GAIE cak LS |
| 1029 | PGDM1400 VH-(G4S)4-VL G1m17 CH1del C220S GA cak LS |
| 1030 | PGDM1400 VH-(G4S)4-VL G1m17 CH1del C220S IE cak LS |
| 1031 | PGDM1400 VH-(G4S)4-VL G1m17,1 CH1del C220S |
| 1032 | PGDM1400 VH-(G4S)4-VL G1m17,1 CH1del C220S LS |
| 1033 | PGDM1400 VH-(G4S)4-VL G1m17,1 CH1del C220S GAALIE LS |
| 1034 | PGDM1400 VH-(G4S)4-VL G1m17,1 CH1del C220S GAIE LS |
| 1035 | PGDM1400 VH-(G4S)4-VL G1m17,1 CH1del C220S GA LS |
| 1036 | PGDM1400 VH-(G4S)4-VL G1m17,1 CH1del C220S IE LS |
| 1037 | PGDM1400 VH-(G4S)4-VL G1m17,1 CH1del C220S cah LS |
| 1038 | PGDM1400 VH-(G4S)4-VL G1m17,1 CH1del C220S GAALIE cah LS |
| 1039 | PGDM1400 VH-(G4S)4-VL G1m17,1 CH1del C220S GAIE cah LS |
| 1040 | PGDM1400 VH-(G4S)4-VL G1m17,1 CH1del C220S GA cah LS |
| 1041 | PGDM1400 VH-(G4S)4-VL G1m17,1 CH1del C220S IE cah LS |
| 1042 | PGDM1400 VH-(G4S)4-VL G1m17,1 CH1del C220S cak LS |
| 1043 | PGDM1400 VH-(G4S)4-VL G1m17,1 CH1del C220S GAALIE cak LS |
| 1044 | PGDM1400 VH-(G4S)4-VL G1m17,1 CH1del C220S GAIE cak LS |
| 1045 | PGDM1400 VH-(G4S)4-VL G1m17,1 CH1del C220S GA cak LS |
| 1046 | PGDM1400 VH-(G4S)4-VL G1m17,1 CH1del C220S IE cak LS |
| 1047 | PGDM1400 VL-(G4S)4-VH G1m3 CH1del C220S |
| 1048 | PGDM1400 VL-(G4S)4-VH G1m3 CH1del C220S LS |
| 1049 | PGDM1400 VL-(G4S)4-VH G1m3 CH1del C220S GAALIE LS |
| 1050 | PGDM1400 VL-(G4S)4-VH G1m3 CH1del C220S GAIE LS |
| 1051 | PGDM1400 VL-(G4S)4-VH G1m3 CH1del C220S GA LS |
| 1052 | PGDM1400 VL-(G4S)4-VH G1m3 CH1del C220S IE LS |
| 1053 | PGDM1400 VL-(G4S)4-VH G1m3 CH1del C220S cah LS |
| 1054 | PGDM1400 VL-(G4S)4-VH G1m3 CH1del C220S GAALIE cah LS |
| 1055 | PGDM1400 VL-(G4S)4-VH G1m3 CH1del C220S GAIE cah LS |
| 1056 | PGDM1400 VL-(G4S)4-VH G1m3 CH1del C220S GA cah LS |
| 1057 | PGDM1400 VL-(G4S)4-VH G1m3 CH1del C220S IE cah LS |
| 1058 | PGDM1400 VL-(G4S)4-VH G1m3 CH1del C220S cak LS |
| 1059 | PGDM1400 VL-(G4S)4-VH G1m3 CH1del C220S GAALIE cak LS |
| 1060 | PGDM1400 VL-(G4S)4-VH G1m3 CH1del C220S GAIE cak LS |
| 1061 | PGDM1400 VL-(G4S)4-VH G1m3 CH1del C220S GA cak LS |
| 1062 | PGDM1400 VL-(G4S)4-VH G1m3 CH1del C220S IE cak LS |
| 1063 | PGDM1400 VL-(G4S)4-VH G1m17 CH1del C220S |
| 1064 | PGDM1400 VL-(G4S)4-VH G1m17 CH1del C220S LS |
| 1065 | PGDM1400 VL-(G4S)4-VH G1m17 CH1del C220S GAALIE LS |
| 1066 | PGDM1400 VL-(G4S)4-VH G1m17 CH1del C220S GAIE LS |
| 1067 | PGDM1400 VL-(G4S)4-VH G1m17 CH1del C220S GA LS |
| 1068 | PGDM1400 VL-(G4S)4-VH G1m17 CH1del C220S IE LS |
| 1069 | PGDM1400 VL-(G4S)4-VH G1m17 CH1del C220S cah LS |
| 1070 | PGDM1400 VL-(G4S)4-VH G1m17 CH1del C220S GAALIE cah LS |
| 1071 | PGDM1400 VL-(G4S)4-VH G1m17 CH1del C220S GAIE cah LS |
| 1072 | PGDM1400 VL-(G4S)4-VH G1m17 CH1del C220S GA cah LS |
| 1073 | PGDM1400 VL-(G4S)4-VH G1m17 CH1del C220S IE cah LS |
| 1074 | PGDM1400 VL-(G4S)4-VH G1m17 CH1del C220S cak LS |
| 1075 | PGDM1400 VL-(G4S)4-VH G1m17 CH1del C220S GAALIE cak LS |
| 1076 | PGDM1400 VL-(G4S)4-VH G1m17 CH1del C220S GAIE cak LS |
| 1077 | PGDM1400 VL-(G4S)4-VH G1m17 CH1del C220S GA cak LS |
| 1078 | PGDM1400 VL-(G4S)4-VH G1m17 CH1del C220S IE cak LS |
| 1079 | PGDM1400 VL-(G4S)4-VH G1m17,1 CH1del C220S |
| 1080 | PGDM1400 VL-(G4S)4-VH G1m17,1 CH1del C220S LS |
| 1081 | PGDM1400 VL-(G4S)4-VH G1m17,1 CH1del C220S GAALIE LS |
| 1082 | PGDM1400 VL-(G4S)4-VH G1m17,1 CH1del C220S GAIE LS |
| 1083 | PGDM1400 VL-(G4S)4-VH G1m17,1 CH1del C220S GA LS |
| 1084 | PGDM1400 VL-(G4S)4-VH G1m17,1 CH1del C220S IE LS |
| 1085 | PGDM1400 VL-(G4S)4-VH G1m17,1 CH1del C220S cah LS |
| 1086 | PGDM1400 VL-(G4S)4-VH G1m17,1 CH1del C220S GAALIE cah LS |
| 1087 | PGDM1400 VL-(G4S)4-VH G1m17,1 CH1del C220S GAIE cah LS |
| 1088 | PGDM1400 VL-(G4S)4-VH G1m17,1 CH1del C220S GA cah LS |
| 1089 | PGDM1400 VL-(G4S)4-VH G1m17,1 CH1del C220S IE cah LS |
| 1090 | PGDM1400 VL-(G4S)4-VH G1m17,1 CH1del C220S cak LS |
| 1091 | PGDM1400 VL-(G4S)4-VH G1m17,1 CH1del C220S GAALIE cak LS |
| 1092 | PGDM1400 VL-(G4S)4-VH G1m17,1 CH1del C220S GAIE cak LS |
| 1093 | PGDM1400 VL-(G4S)4-VH G1m17,1 CH1del C220S GA cak LS |
| 1094 | PGDM1400 VL-(G4S)4-VH G1m17,1 CH1del C220S IE cak LS |
| 1095 | PGDM1400 VH-(G4S)5-VL G1m3 CH1del C220S |
| 1096 | PGDM1400 VH-(G4S)5-VL G1m3 CH1del C220S LS |
| 1097 | PGDM1400 VH-(G4S)5-VL G1m3 CH1del C220S GAALIE LS |
| 1098 | PGDM1400 VH-(G4S)5-VL G1m3 CH1del C220S GAIE LS |
| 1099 | PGDM1400 VH-(G4S)5-VL G1m3 CH1del C220S GA LS |
| 1100 | PGDM1400 VH-(G4S)5-VL G1m3 CH1del C220S IE LS |
| 1101 | PGDM1400 VH-(G4S)5-VL G1m3 CH1del C220S cah LS |
| 1102 | PGDM1400 VH-(G4S)5-VL G1m3 CH1del C220S GAALIE cah LS |
| 1103 | PGDM1400 VH-(G4S)5-VL G1m3 CH1del C220S GAIE cah LS |
| 1104 | PGDM1400 VH-(G4S)5-VL G1m3 CH1del C220S GA cah LS |
| 1105 | PGDM1400 VH-(G4S)5-VL G1m3 CH1del C220S IE cah LS |
| 1106 | PGDM1400 VH-(G4S)5-VL G1m3 CH1del C220S cak LS |
| 1107 | PGDM1400 VH-(G4S)5-VL G1m3 CH1del C220S GAALIE cak LS |
| 1108 | PGDM1400 VH-(G4S)5-VL G1m3 CH1del C220S GAIE cak LS |
| 1109 | PGDM1400 VH-(G4S)5-VL G1m3 CH1del C220S GA cak LS |
| 1110 | PGDM1400 VH-(G4S)5-VL G1m3 CH1del C220S IE cak LS |
| 1111 | PGDM1400 VH-(G4S)5-VL G1m17 CH1del C220S |
| 1112 | PGDM1400 VH-(G4S)5-VL G1m17 CH1del C220S LS |
| 1113 | PGDM1400 VH-(G4S)5-VL G1m17 CH1del C220S GAALIE LS |
| 1114 | PGDM1400 VH-(G4S)5-VL G1m17 CH1del C220S GAIE LS |
| 1115 | PGDM1400 VH-(G4S)5-VL G1m17 CH1del C220S GA LS |
| 1116 | PGDM1400 VH-(G4S)5-VL G1m17 CH1del C220S IE LS |
| 1117 | PGDM1400 VH-(G4S)5-VL G1m17 CH1del C220S cah LS |
| 1118 | PGDM1400 VH-(G4S)5-VL G1m17 CH1del C220S GAALIE cah LS |
| 1119 | PGDM1400 VH-(G4S)5-VL G1m17 CH1del C220S GAIE cah LS |
| 1120 | PGDM1400 VH-(G4S)5-VL G1m17 CH1del C220S GA cah LS |
| 1121 | PGDM1400 VH-(G4S)5-VL G1m17 CH1del C220S IE cah LS |
| 1122 | PGDM1400 VH-(G4S)5-VL G1m17 CH1del C220S cak LS |
| 1123 | PGDM1400 VH-(G4S)5-VL G1m17 CH1del C220S GAALIE cak LS |
| 1124 | PGDM1400 VH-(G4S)5-VL G1m17 CH1del C220S GAIE cak LS |
| 1125 | PGDM1400 VH-(G4S)5-VL G1m17 CH1del C220S GA cak LS |
| 1126 | PGDM1400 VH-(G4S)5-VL G1m17 CH1del C220S IE cak LS |
| 1127 | PGDM1400 VH-(G4S)5-VL G1m17,1 CH1del C220S |
| 1128 | PGDM1400 VH-(G4S)5-VL G1m17,1 CH1del C220S LS |
| 1129 | PGDM1400 VH-(G4S)5-VL G1m17,1 CH1del C220S GAALIE LS |
| 1130 | PGDM1400 VH-(G4S)5-VL G1m17,1 CH1del C220S GAIE LS |
| 1131 | PGDM1400 VH-(G4S)5-VL G1m17,1 CH1del C220S GA LS |
| 1132 | PGDM1400 VH-(G4S)5-VL G1m17,1 CH1del C220S IE LS |
| 1133 | PGDM1400 VH-(G4S)5-VL G1m17,1 CH1del C220S cah LS |
| 1134 | PGDM1400 VH-(G4S)5-VL G1m17,1 CH1del C220S GAALIE cah LS |
| 1135 | PGDM1400 VH-(G4S)5-VL G1m17,1 CH1del C220S GAIE cah LS |
| 1136 | PGDM1400 VH-(G4S)5-VL G1m17,1 CH1del C220S GA cah LS |
| 1137 | PGDM1400 VH-(G4S)5-VL G1m17,1 CH1del C220S IE cah LS |
| 1138 | PGDM1400 VH-(G4S)5-VL G1m17,1 CH1del C220S cak LS |
| 1139 | PGDM1400 VH-(G4S)5-VL G1m17,1 CH1del C220S GAALIE cak LS |
| 1140 | PGDM1400 VH-(G4S)5-VL G1m17,1 CH1del C220S GAIE cak LS |
| 1141 | PGDM1400 VH-(G4S)5-VL G1m17,1 CH1del C220S GA cak LS |
| 1142 | PGDM1400 VH-(G4S)5-VL G1m17,1 CH1del C220S IE cak LS |
| 1143 | PGDM1400 VL-(G4S)5-VH G1m3 CH1del C220S |
| 1144 | PGDM1400 VL-(G4S)5-VH G1m3 CH1del C220S LS |
| 1145 | PGDM1400 VL-(G4S)5-VH G1m3 CH1del C220S GAALIE LS |
| 1146 | PGDM1400 VL-(G4S)5-VH G1m3 CH1del C220S GAIE LS |
| 1147 | PGDM1400 VL-(G4S)5-VH G1m3 CH1del C220S GA LS |
| 1148 | PGDM1400 VL-(G4S)5-VH G1m3 CH1del C220S IE LS |
| 1149 | PGDM1400 VL-(G4S)5-VH G1m3 CH1del C220S cah LS |
| 1150 | PGDM1400 VL-(G4S)5-VH G1m3 CH1del C220S GAALIE cah LS |
| 1151 | PGDM1400 VL-(G4S)5-VH G1m3 CH1del C220S GAIE cah LS |
| 1152 | PGDM1400 VL-(G4S)5-VH G1m3 CH1del C220S GA cah LS |
| 1153 | PGDM1400 VL-(G4S)5-VH G1m3 CH1del C220S IE cah LS |
| 1154 | PGDM1400 VL-(G4S)5-VH G1m3 CH1del C220S cak LS |
| 1155 | PGDM1400 VL-(G4S)5-VH G1m3 CH1del C220S GAALIE cak LS |
| 1156 | PGDM1400 VL-(G4S)5-VH G1m3 CH1del C220S GAIE cak LS |
| 1157 | PGDM1400 VL-(G4S)5-VH G1m3 CH1del C220S GA cak LS |
| 1158 | PGDM1400 VL-(G4S)5-VH G1m3 CH1del C220S IE cak LS |
| 1159 | PGDM1400 VL-(G4S)5-VH G1m17 CH1del C220S |
| 1160 | PGDM1400 VL-(G4S)5-VH G1m17 CH1del C220S LS |
| 1161 | PGDM1400 VL-(G4S)5-VH G1m17 CH1del C220S GAALIE LS |
| 1162 | PGDM1400 VL-(G4S)5-VH G1m17 CH1del C220S GAIE LS |
| 1163 | PGDM1400 VL-(G4S)5-VH G1m17 CH1del C220S GA LS |
| 1164 | PGDM1400 VL-(G4S)5-VH G1m17 CH1del C220S IE LS |
| 1165 | PGDM1400 VL-(G4S)5-VH G1m17 CH1del C220S cah LS |
| 1166 | PGDM1400 VL-(G4S)5-VH G1m17 CH1del C220S GAALIE cah LS |
| 1167 | PGDM1400 VL-(G4S)5-VH G1m17 CH1del C220S GAIE cah LS |
| 1168 | PGDM1400 VL-(G4S)5-VH G1m17 CH1del C220S GA cah LS |
| 1169 | PGDM1400 VL-(G4S)5-VH G1m17 CH1del C220S IE cah LS |
| 1170 | PGDM1400 VL-(G4S)5-VH G1m17 CH1del C220S cak LS |
| 1171 | PGDM1400 VL-(G4S)5-VH G1m17 CH1del C220S GAALIE cak LS |
| 1172 | PGDM1400 VL-(G4S)5-VH G1m17 CH1del C220S GAIE cak LS |
| 1173 | PGDM1400 VL-(G4S)5-VH G1m17 CH1del C220S GA cak LS |
| 1174 | PGDM1400 VL-(G4S)5-VH G1m17 CH1del C220S IE cak LS |
| 1175 | PGDM1400 VL-(G4S)5-VH G1m17,1 CH1del C220S |
| 1176 | PGDM1400 VL-(G4S)5-VH G1m17,1 CH1del C220S LS |
| 1177 | PGDM1400 VL-(G4S)5-VH G1m17,1 CH1del C220S GAALIE LS |
| 1178 | PGDM1400 VL-(G4S)5-VH G1m17,1 CH1del C220S GAIE LS |
| 1179 | PGDM1400 VL-(G4S)5-VH G1m17,1 CH1del C220S GA LS |
| 1180 | PGDM1400 VL-(G4S)5-VH G1m17,1 CH1del C220S IE LS |
| 1181 | PGDM1400 VL-(G4S)5-VH G1m17,1 CH1del C220S cah LS |
| 1182 | PGDM1400 VL-(G4S)5-VH G1m17,1 CH1del C220S GAALIE cah LS |
| 1183 | PGDM1400 VL-(G4S)5-VH G1m17,1 CH1del C220S GAIE cah LS |
| 1184 | PGDM1400 VL-(G4S)5-VH G1m17,1 CH1del C220S GA cah LS |
| 1185 | PGDM1400 VL-(G4S)5-VH G1m17,1 CH1del C220S IE cah LS |
| 1186 | PGDM1400 VL-(G4S)5-VH G1m17,1 CH1del C220S cak LS |
| 1187 | PGDM1400 VL-(G4S)5-VH G1m17,1 CH1del C220S GAALIE cak LS |
| 1188 | PGDM1400 VL-(G4S)5-VH G1m17,1 CH1del C220S GAIE cak LS |
| 1189 | PGDM1400 VL-(G4S)5-VH G1m17,1 CH1del C220S GA cak LS |
| 1190 | PGDM1400 VL-(G4S)5-VH G1m17,1 CH1del C220S IE cak LS |

### B. RNA Formats

[0672] At least three distinct formats useful for RNA compositions (e.g., pharmaceutical compositions) have been developed, namely non-modified uridine containing mRNA (uRNA), nucleoside-modified mRNA (modRNA), and self-amplifying mRNA (saRNA). Each of these platforms displays unique features. In general, in all three formats, RNA is capped, contains open reading frames (ORFs) flanked by untranslated regions (UTR), and have a polyA-tail at the 3′ end. An ORF of an uRNA and modRNA vectors encode an antibody agent or portion thereof. An saRNA has multiple ORFs.

[0673] In some embodiments, the RNA described herein may have modified nucleosides. In some embodiments, the RNA comprises a modified nucleoside in place of at least one (e.g., every) uridine.

[0674] The term “uracil,” as used herein, describes one of the nucleobases that can occur in the nucleic acid of RNA. The structure of uracil is:

[chemical structure]

[0675] The term “uridine,” as used herein, describes one of the nucleosides that can occur in RNA. The structure of uridine is:

[chemical structure]

[0676] UTP (uridine 5′-triphosphate) has the following structure:

[chemical structure]

[0677] Pseudo-UTP (pseudouridine 5′-triphosphate) has the following structure:

[chemical structure]

[0678] “Pseudouridine” is one example of a modified nucleoside that is an isomer of uridine, where the uracil is attached to the pentose ring via a carbon-carbon bond instead of a nitrogen-carbon glycosidic bond.

[0679] Another exemplary modified nucleoside is N1-methyl-pseudouridine (m1ψ), which has the structure:

[chemical structure]

[0680] N1-methyl-pseudo-UTP has the following structure:

[chemical structure]

[0681] Another exemplary modified nucleoside is 5-methyl-uridine (m5U), which has the structure:

[chemical structure]

[0682] In some embodiments, one or more uridine in the RNA described herein is replaced by a modified nucleoside. In some embodiments, the modified nucleoside is a modified uridine.

[0683] In some embodiments, RNA comprises a modified nucleoside in place of at least one uridine. In some embodiments, RNA comprises a modified nucleoside in place of each uridine.

[0684] In some embodiments, the modified nucleoside is independently selected from pseudouridine (ψ), N1-methyl-pseudouridine (m1ψ), and 5-methyl-uridine (m5U). In some embodiments, the modified nucleoside comprises pseudouridine (ψ). In some embodiments, the modified nucleoside comprises N1-methyl-pseudouridine (m1ψ). In some embodiments, the modified nucleoside comprises 5-methyl-uridine (m5U). In some embodiments, RNA may comprise more than one type of modified nucleoside, and the modified nucleosides are independently selected from pseudouridine (ψ), N1-methyl-pseudouridine (m1ψ), and 5-methyl-uridine (m5U). In some embodiments, the modified nucleosides comprise pseudouridine (ψ) and N1-methyl-pseudouridine (m1ψ). In some embodiments, the modified nucleosides comprise pseudouridine (ψ) and 5-methyl-uridine (m5U). In some embodiments, the modified nucleosides comprise N1-methyl-pseudouridine (m1ψ) and 5-methyl-uridine (m5U). In some embodiments, the modified nucleosides comprise pseudouridine (ψ), N1-methyl-pseudouridine (m1ψ), and 5-methyl-uridine (m5U).

[0685] In some embodiments, the modified nucleoside replacing one or more, e.g., all, uridine in the RNA may be any one or more of 3-methyl-uridine (m3U), 5-methoxy-uridine (mo5U), 5-aza-uridine, 6-aza-uridine, 2-thio-5-aza-uridine, 2-thio-uridine (s2U), 4-thio-uridine (s4U), 4-thio-pseudouridine, 2-thio-pseudouridine, 5-hydroxy-uridine (ho5U), 5-aminoallyl-uridine, 5-halo-uridine (e.g., 5-iodo-uridine or 5-bromo-uridine), uridine 5-oxyacetic acid (cmo5U), uridine 5-oxyacetic acid methyl ester (mcmo5U), 5-carboxymethyl-uridine (cm5U), 1-carboxymethyl-pseudouridine, 5-carboxyhydroxymethyl-uridine (chm5U), 5-carboxyhydroxymethyl-uridine methyl ester (mchm5U), 5-methoxycarbonylmethyl-uridine (mcm5U), 5-methoxycarbonylmethyl-2-thio-uridine (mcm5s2U), 5-aminomethyl-2-thio-uridine (nm5s2U), 5-methylaminomethyl-uridine (mnm5U), 1-ethyl-pseudouridine, 5-methylaminomethyl-2-thio-uridine (mnm5s2U), 5-methylaminomethyl-2-seleno-uridine (mnm5se2U), 5-carbamoylmethyl-uridine (ncm5U), 5-carboxymethylaminomethyl-uridine (cmnm5U), 5-carboxymethylaminomethyl-2-thio-uridine (cmnm5s2U), 5-propynyl-uridine, 1-propynyl-pseudouridine, 5-taurinomethyl-uridine (τm5U), 1-taurinomethyl-pseudouridine, 5-taurinomethyl-2-thio-uridine(τm5s2U), 1-taurinomethyl-4-thio-pseudouridine), 5-methyl-2-thio-uridine (m5s2U), 1-methyl-4-thio-pseudouridine (m1s4y), 4-thio-1-methyl-pseudouridine, 3-methyl-pseudouridine (m3ψ), 2-thio-1-methyl-pseudouridine, 1-methyl-1-deaza-pseudouridine, 2-thio-1-methyl-1-deaza-pseudouridine, dihydrouridine (D), dihydropseudouridine, 5,6-dihydrouridine, 5-methyl-dihydrouridine (m5D), 2-thio-dihydrouridine, 2-thio-dihydropseudouridine, 2-methoxy-uridine, 2-methoxy-4-thio-uridine, 4-methoxy-pseudouridine, 4-methoxy-2-thio-pseudouridine, N1-methyl-pseudouridine, 3-(3-amino-3-carboxypropyl)uridine (acp3U), 1-methyl-3-(3-amino-3-carboxypropyl)pseudouridine (acp3 Lp), 5-(isopentenylaminomethyl)uridine (inm5U), 5-(isopentenylaminomethyl)-2-thio-uridine (inm5s2U), α-thio-uridine, 2′-O-methyl-uridine (Urn), 5,2′-O-dimethyl-uridine (m5Um), 2′-O-methyl-pseudouridine (ψm), 2-thio-2′-O-methyl-uridine (s2Um), 5-methoxycarbonylmethyl-2′-O-methyl-uridine (mcm5Um), 5-carbamoylmethyl-2′-O-methyl-uridine (ncm5Um), 5-carboxymethylaminomethyl-2′-O-methyl-uridine (cmnm5Um), 3,2′-O-dimethyl-uridine (m3Um), 5-(isopentenylaminomethyl)-2′-O-methyl-uridine (inm5Um), 1-thio-uridine, deoxythymidine, 2′-F-ara-uridine, 2′-F-uridine, 2′-OH-ara-uridine, 5-(2-carbomethoxyvinyl) uridine, 5-[3-(1-E-propenylamino)uridine, or any other modified uridine known in the art.

[0686] In some embodiments, the RNA comprises other modified nucleosides or comprises further modified nucleosides, e.g., modified cytidine. For example, in some embodiments, in the RNA 5-methylcytidine is substituted partially or completely, preferably completely, for cytidine. In some embodiments, the RNA comprises 5-methylcytidine and one or more selected from pseudouridine (ψ), N1-methyl-pseudouridine (m1ψ), and 5-methyl-uridine (m5U). In some embodiments, the RNA comprises 5-methylcytidine and N1-methyl-pseudouridine (m1ψ). In some embodiments, the RNA comprises 5-methylcytidine in place of each cytidine and N1-methyl-pseudouridine (m1ψ) in place of each uridine.

[0687] In some embodiments of the present disclosure, the RNA is “replicon RNA” or simply a “replicon,” in particular “self-replicating RNA” or “self-amplifying RNA.” In one particularly preferred embodiment, the replicon or self-replicating RNA is derived from or comprises elements derived from a single-stranded (ss) RNA virus, in particular a positive-stranded ssRNA virus, such as an alphavirus. Alphaviruses are typical representatives of positive-stranded RNA viruses. Alphaviruses replicate in the cytoplasm of infected cells (for review of the alphaviral life cycle see José et al., Future Microbiol., 2009, vol. 4, pp. 837-856, which is incorporated herein by reference in its entirety). The total genome length of many alphaviruses typically ranges between 11,000 and 12,000 nucleotides, and the genomic RNA typically has a 5′-cap, and a 3′ poly(A) tail. The genome of alphaviruses encodes non-structural proteins (involved in transcription, modification and replication of viral RNA and in protein modification) and structural proteins (forming the virus particle). There are typically two open reading frames (ORFs) in the genome. The four non-structural proteins (nsP1-nsP4) are typically encoded together by a first ORF beginning near the 5′ terminus of the genome, while alphavirus structural proteins are encoded together by a second ORF which is found downstream of the first ORF and extends near the 3′ terminus of the genome. Typically, the first ORF is larger than the second ORF, the ratio being roughly 2:1. In cells infected by an alphavirus, only the nucleic acid sequence encoding non-structural proteins is translated from the genomic RNA, while the genetic information encoding structural proteins is translatable from a subgenomic transcript, which is an RNA molecule that resembles eukaryotic messenger RNA (mRNA; Gould et al., 2010, Antiviral Res., vol. 87 pp. 111-124). Following infection, i.e., at early stages of the viral life cycle, the (+) stranded genomic RNA directly acts like a messenger RNA for the translation of the open reading frame encoding the non-structural poly-protein (nsP1234).

[0688] Alphavirus-derived vectors have been proposed for delivery of foreign genetic information into target cells or target organisms. In simple approaches, a first ORF encodes an alphavirus-derived RNA-dependent RNA polymerase (replicase), which upon translation mediates self-amplification of the RNA. A second ORF encoding alphaviral structural proteins is replaced by an open reading frame encoding a protein of interest, e.g., an antibody agent. Alphavirus-based trans-replication systems rely on alphavirus nucleotide sequence elements on two separate nucleic acid molecules: one nucleic acid molecule encodes a viral replicase, and the other nucleic acid molecule is capable of being replicated by said replicase in trans (hence the designation trans-replication system). Trans-replication requires the presence of both these nucleic acid molecules in a given host cell. The nucleic acid molecule capable of being replicated by the replicase in trans must comprise certain alphaviral sequence elements to allow recognition and RNA synthesis by the alphaviral replicase.

[0689] Features of a non-modified uridine platform may include, for example, one or more of intrinsic adjuvant effect, as well as good tolerability and safety. Features of modified uridine (e.g., pseudouridine) platform may include reduced adjuvant effect, blunted immune innate immune sensor activating capacity and thus good tolerability and safety. Features of self-amplifying platform may include, for example, long duration of protein expression, good tolerability and safety, higher likelihood for efficacy with very low vaccine dose.

[0690] The present disclosure provides particular RNA constructs optimized, for example, for improved manufacturability, encapsulation, expression level (and/or timing), etc. Certain components are discussed below, and certain preferred embodiments are exemplified herein.

### C. Codon Optimization and GC Enrichment

[0691] As used herein, the term “codon-optimized” refers to alteration of codons in a coding region of a nucleic acid molecule (e.g., a polyribonucleotide) to reflect the typical codon usage of a host organism (e.g., a subject receiving a nucleic acid molecule (e.g., a polyribonucleotide)) without preferably altering the amino acid sequence encoded by the nucleic acid molecule. Within the context of the present disclosure, in some embodiments, coding regions are codon-optimized for optimal expression in a subject to be treated using the RNA molecules described herein. In some embodiments, codon-optimization may be performed such that codons for which frequently occurring tRNAs are available are inserted in place of “rare codons.” In some embodiments, codon-optimization may include increasing guanosine/cytosine (G/C) content of a coding region of RNA described herein as compared to the G/C content of the corresponding coding sequence of a wild type RNA, wherein the amino acid sequence encoded by the RNA is preferably not modified compared to the amino acid sequence.

[0692] In some embodiments, a coding sequence (also referred to as a “coding region”) is codon optimized for expression in the subject to whom a composition (e.g., a pharmaceutical composition) is to be administered (e.g., a human). Thus, in some embodiments, sequences in such a polynucleotide (e.g., a polyribonucleotide) may differ from wild type sequences encoding the relevant antigen or fragment or epitope thereof, even when the amino acid sequence of the antigen or fragment or epitope thereof is wild type.

[0693] In some embodiments, strategies for codon optimization for expression in a relevant subject (e.g., a human), and even, in some cases, for expression in a particular cell or tissue.

[0694] Various species exhibit particular bias for certain codons of a particular amino acid. Without wishing to be bound by any one theory, codon bias (differences in codon usage between organisms) often correlates with the efficiency of translation of messenger RNA (mRNA), which is in turn believed to be dependent on, among other things, the properties of the codons being translated and the availability of particular transfer RNA (tRNA) molecules. The predominance of selected tRNAs in a cell may generally be a reflection of the codons used most frequently in peptide synthesis. Accordingly, genes may be tailored for optimal gene expression in a given organism based on codon optimization. Codon usage tables are available, for example, at the “Codon Usage Database” available at www.kazusa.orjp/codon/ and these tables may be adapted in a number of ways. Computer algorithms for codon optimizing a particular sequence for expression in a particular subject or its cells are also available, such as Gene Forge (Aptagen; Jacobus, PA), are also available.

[0695] In some embodiments, a polynucleotide (e.g., a polyribonucleotide) of the present disclosure is codon optimized, wherein the codons in the polynucleotide (e.g., the polyribonucleotide) are adapted to human codon usage (herein referred to as “human codon optimized polynucleotide”). Codons encoding the same amino acid occur at different frequencies in a subject, e.g., a human. Accordingly, in some embodiments, the coding sequence of a polynucleotide of the present disclosure is modified such that the frequency of the codons encoding the same amino acid corresponds to the naturally occurring frequency of that codon according to the human codon usage, e.g., as shown in Table 9. For example, in the case of the amino acid Ala, the wild type coding sequence is preferably adapted in a way that the codon “GCC” is used with a frequency of 0.40, the codon “GCT” is used with a frequency of 0.28, the codon “GCA” is used with a frequency of 0.22 and the codon “GCG” is used with 30 a frequency of 0.10 etc. (see Table 9). Accordingly, in some embodiments, such a procedure (as exemplified for Ala) is applied for each amino acid encoded by the coding sequence of a polynucleotide to obtain sequences adapted to human codon usage.

TABLE 9
Human codon usage table with frequencies
indicated for each amino acid.

| Amino acid | codon | frequency | Amino acid | codon | frequency |
|---|---|---|---|---|---|
| Ala | GCG | 0.10 | Pro | CCG | 0.11 |
| Ala | GCA | 0.22 | Pro | CCA | 0.27 |
| Ala | GCT | 0.28 | Pro | CCT | 0.29 |
| Ala | GCC* | 0.40 | Pro | CCC* | 0.33 |
| Cys | TGT | 0.42 | Gln | CAG* | 0.73 |
| Cys | TGC* | 0.58 | Gln | CAA | 0.27 |
| Asp | GAT | 0.44 | Arg | AGG | 0.22 |
| Asp | GAC* | 0.56 | Arg | AGA* | 0.21 |
| Glu | GAG* | 0.59 | Arg | CGG | 0.19 |
| Glu | GAA | 0.41 | Arg | CGA | 0.10 |
| Phe | TTT | 0.43 | Arg | CGT | 0.09 |
| Phe | TTC* | 0.57 | Arg | CGC | 0.19 |
| Gly | GGG | 0.23 | Ser | AGT | 0.14 |
| Gly | GGA | 0.26 | Ser | AGC* | 0.25 |
| Gly | GGT | 0.18 | Ser | TCG | 0.06 |
| Gly | GGC* | 0.33 | Ser | TCA | 0.15 |
| His | CAT | 0.41 | Ser | TCT | 0.18 |
| His | CAC* | 0.59 | Ser | TCC | 0.23 |
| Ile | ATA | 0.14 | Thr | ACG | 0.12 |
| Ile | ATT | 0.35 | Thr | ACA | 0.27 |
| Ile | ATC* | 0.52 | Thr | ACT | 0.23 |
| Lys | AAG* | 0.60 | Tor | ACC* | 0.38 |
| Lys | AAA | 0.40 | Val | GTG* | 0.48 |
| Leu | TTG | 0.12 | Val | GTA | 0.10 |
| Leu | TTA | 0.06 | Val | GTT | 0.17 |
| Leu | CTG* | 0.43 | Val | GTC | 0.25 |
| Leu | CTA | 0.07 | Trp | TGG* | 1 |
| Leu | CTT | 0.12 | Tyr | TAT | 0 42 |
| Lou | CTC | 0.20 | Tyr | TAC* | 0.58 |
| Met | ATG* | 1 | Stop | TGA* | 0 61 |
| Asn | AAT | 0.44 | Stop | TAG | 0.17 |
| Asn | AAC* | 0.56 | Stop | TAA | 0.22 |

[0696] Certain strategies for codon optimization and/or G/C enrichment for human expression are described in WO2002/098443, which is incorporated by reference herein in its entirety. In some embodiments, a coding sequence may be optimized using a multiparametric optimization strategy. In some embodiments, optimization parameters may include parameters that influence protein expression, which can be, for example, impacted on a transcription level, an mRNA level, and/or a translational level. In some embodiments, exemplary optimization parameters include, but are not limited to transcription-level parameters (including, e.g., GC content, consensus splice sites, cryptic splice sites, SD sequences, TATA boxes, termination signals, artificial recombination sites, and combinations thereof); mRNA-level parameters (including, e.g., RNA instability motifs, ribosomal entry sites, repetitive sequences, and combinations thereof); translation-level parameters (including, e.g., codon usage, premature poly(A) sites, ribosomal entry sites, secondary structures, and combinations thereof); or combinations thereof. In some embodiments, a coding sequence may be optimized by a GeneOptimizer algorithm as described in Fath et al. “Multiparameter RNA and Codon Optimization: A Standardized Tool to Assess and Enhance Autologous Mammalian Gene Expression” PLoS ONE 6(3): e17596; Rabb et al., “The GeneOptimizer Algorithm: using a sliding window approach to cope with the vast sequence space in multiparameter DNA sequence optimization” Systems and Synthetic Biology (2010) 4:215-225; and Graft et al. “Codon-optimized genes that enable increased heterologous expression in mammalian cells and elicit efficient immune responses in mice after vaccination of naked DNA” Methods Mol Med (2004) 94:197-210, the entire content of each of which is incorporated herein for the purposes described herein. In some embodiments, a coding sequence may be optimized by Eurofins' adaption and optimization algorithm “GENEius” as described in Eurofins' Application Notes: Eurofins' adaption and optimization software “GENEius” in comparison to other optimization algorithms, the entire content of which is incorporated by reference for the purposes described herein.

[0697] In some embodiments, a coding sequence utilized in accordance with the present disclosure has G/C content of which increased compared to a wild type coding sequence for a relevant antibody agent directed against an HIV (e.g., HIV-1) polypeptide, or fragment or epitope thereof (e.g., an epitope within the Env trimer apex). In some embodiments, guanosine/cytidine (G/C) content of a coding region is modified relative to a wild type coding sequence for a relevant antibody agent directed against an HIV (e.g., HIV-1) polypeptide, or fragment or epitope thereof (e.g., an epitope within the Env trimer apex), but the amino acid sequence encoded by the polyribonucleotide not modified.

[0698] Without wishing to be bound by any particular theory, it is proposed that GC enrichment may improve translation of a payload sequence. Typically, sequences having an increased G (guanosine)/C (cytidine) content are more stable than sequences having an increased A (adenosine)/U (uridine) content. In respect to the fact that several codons code for one and the same amino acid (so-called degeneration of the genetic code), the most favorable codons for the stability can be determined (so-called alternative codon usage). Depending on the amino acid to be encoded by a polyribonucleotide, there are various possibilities for modification of the ribonucleic acid sequence, compared to its wild type sequence. In particular, codons which contain A and/or U nucleosides can be modified by substituting these codons by other codons, which code for the same amino acids but contain no A and/or U or contain a lower content of A and/or U nucleosides.

[0699] In some embodiments, G/C content of a coding region of a polyribonucleotide described herein is increased by at least 1%, at least 2%, at least 3%, at least 4%, at least 5%, at least 6%, or even more compared to the G/C content of the coding region prior to codon optimization, e.g., of the wild type RNA. In some embodiments, G/C content of a coding region of a polyribonucleotide described herein is decreased by at least 1%, at least 2%, at least 3%, at least 4%, at least 5%, at least 6%, or even more compared to the G/C content of the coding region prior to codon optimization, e.g., of the wild type RNA.

[0700] In some embodiments, stability and translation efficiency of a polyribonucleotide may incorporate one or more elements established to contribute to stability and/or translation efficiency of the polyribonucleotide; exemplary such elements are described, for example, in PCT/EP2006/009448 incorporated herein by reference. In some embodiments, to increase expression of a polyribonucleotide used according to the present disclosure, a polyribonucleotide may be modified within the coding region, i.e., the sequence encoding the expressed peptide or protein, without altering the sequence of the expressed peptide or protein, for example so as to increase the GC-content to increase mRNA stability and/or to perform a codon optimization and, thus, enhance translation in cells.

### IV. RNA Delivery Technologies

[0701] Provided polyribonucleotides may be delivered for therapeutic applications described herein using any appropriate methods known in the art, including, e.g., delivery as naked RNAs, or delivery mediated by viral and/or non-viral vectors, polymer-based vectors, lipid-based vectors, nanoparticles (e.g., lipid nanoparticles, polymeric nanoparticles, lipid-polymer hybrid nanoparticles, etc.), and/or peptide-based vectors. See, e.g., Wadhwa et al. “Opportunities and Challenges in the Delivery of mRNA-Based Vaccines” Pharmaceutics (2020) 102 (27 pages), the content of which is incorporated herein by reference, for information on various approaches that may be useful for delivery polyribonucleotides described herein.

[0702] In some embodiments, one or more polyribonucleotides can be formulated with lipid nanoparticles for delivery (e.g., administration).

[0703] In some embodiments, lipid nanoparticles can be designed to protect polyribonucleotides from extracellular RNases and/or engineered for systemic delivery of the RNA to target cells (e.g., liver cells). In some embodiments, such lipid nanoparticles may be particularly useful to deliver polyribonucleotides when polyribonucleotides are intravenously or intramuscularly administered to a subject.

### A. Particles for Delivery of at Least One Polyribonucleotide

[0704] Polyribonucleotides provided herein can be delivered by particles. In the context of the present disclosure, the term “particle” relates to a structured entity formed by molecules or molecule complexes. In some embodiments, the term “particle” relates to a micro- or nano-sized structure, such as a micro- or nano-sized compact structure dispersed in a medium. In some embodiments, a particle is a nucleic acid containing particle such as a particle comprising a polyribonucleotide.

[0705] Electrostatic interactions between positively charged molecules such as polymers and lipids and negatively charged nucleic acid (e.g., a polyribonucleotide) are involved in particle formation. This results in complexation and spontaneous formation of nucleic acid particles (e.g., ribonucleic acid particles). In some embodiments, a nucleic acid particle (e.g., ribonucleic acid particle) is a nanoparticle.

[0706] A “nucleic acid particle” (e.g., a ribonucleic acid particle) are particles that encompass or contain a nucleic acid, and are used to deliver nucleic acid (e.g., a polyribonucleotide) to a target site of interest (e.g., cell, tissue, organ, and the like). A nucleic acid particle (e.g., a ribonucleic acid particle) may be formed from (i) at least one cationic or cationically ionizable lipid or lipid-like material, (ii) at least one cationic polymer such as protamine, or a mixture of (i) and (ii), and (iii) nucleic acid (e.g., a polyribonucleotide). Nucleic acid particles (e.g., a ribonucleic acid particle) include lipid nanoparticles (lipid nanoparticle) and lipoplexes (LPX).

[0707] In some embodiments, nucleic acid particles (e.g., ribonucleic acid particles) comprise more than one type of nucleic acid molecules (e.g., polyribonucleotides), where the molecular parameters of the nucleic acid molecules may be similar or different from each other, like with respect to molar mass or fundamental structural elements such as molecular architecture, capping, coding regions or other features.

[0708] In some embodiments, provided nucleic acid particles (e.g., ribonucleic acid particles) can comprise lipid nanoparticles. As used in the present disclosure, “nanoparticle” refers to a particle having an average diameter suitable for parenteral administration. In various embodiments, lipid nanoparticles can have an average size (e.g., mean diameter) of about 30 nm to about 150 nm, about 40 nm to about 150 nm, about 50 nm to about 150 nm, about 60 nm to about 130 nm, about 70 nm to about 110 nm, about 70 nm to about 100 nm, about 70 to about 90 nm, or about 70 nm to about 80 nm. In some embodiments, lipid nanoparticles in accordance with the present disclosure can have an average size (e.g., mean diameter) of about 50 nm to about 100 nm. In some embodiments, lipid nanoparticles may have an average size (e.g., mean diameter) of about 50 nm to about 150 nm. In some embodiments, lipid nanoparticles may have an average size (e.g., mean diameter) of about 60 nm to about 120 nm. In some embodiments, lipid nanoparticles in accordance with the present disclosure can have an average size (e.g., mean diameter) of about 30 nm, 35 nm, 40 nm, 45 nm, 50 nm, 55 nm, 60 nm, 65 nm, 70 nm, 75 nm, 80 nm, 85 nm, 90 nm, 95 nm, 100 nm, 105 nm, 110 nm, 115 nm, 120 nm, 125 nm, 130 nm, 135 nm, 140 nm, 145 nm, or 150 nm.

[0709] Nucleic acid particles (e.g., ribonucleic acid particles) described herein may exhibit a polydispersity index less than about 0.5, less than about 0.4, less than about 0.3, or about 0.2 or less. By way of example, the nucleic acid particles (e.g., ribonucleic acid particles) can exhibit a polydispersity index in a range of about 0.1 to about 0.3 or about 0.2 to about 0.3.

[0710] Nucleic acid particles (e.g., ribonucleic acid particles) described herein can be characterized by an “N/P ratio,” which is the molar ratio of cationic (nitrogen) groups (the “N” in N/P) in the cationic polymer to the anionic (phosphate) groups (the “P” in N/P) in RNA. It is understood that a cationic group is one that is either in cationic form (e.g., N⁺), or one that is ionizable to become cationic. Use of a single number in an N/P ratio (e.g., an N/P ratio of about 5) is intended to refer to that number over 1, e.g., an N/P ratio of about 5 is intended to mean 5:1. In some embodiments, a nucleic acid particle (e.g., a ribonucleic acid particle) described herein has an N/P ratio greater than or equal to 5. In some embodiments, a nucleic acid particle (e.g., a ribonucleic acid particle) described herein has an N/P ratio that is about 5, 6, 7, 8, 9, or 10. In some embodiments, an N/P ratio for a nucleic acid particle (e.g., a ribonucleic acid particle) described herein is from about 10 to about 50. In some embodiments, an N/P ratio for a nucleic acid particle (e.g., a ribonucleic acid particle) described herein is from about 10 to about 70. In some embodiments, an N/P ratio for a nucleic acid particle (e.g., a ribonucleic acid particle) described herein is from about 10 to about 120.

[0711] Nucleic acid particles (e.g., ribonucleic acid particles) described herein can be prepared using a wide range of methods that may involve obtaining a colloid from at least one cationic or cationically ionizable lipid or lipid-like material and/or at least one cationic polymer and mixing the colloid with nucleic acid to obtain nucleic acid particles.

[0712] The term “colloid” as used herein relates to a type of homogeneous mixture in which dispersed particles do not settle out. The insoluble particles in the mixture can be microscopic, with particle sizes between 1 and 1000 nanometers. The mixture may be termed a colloid or a colloidal suspension. Sometimes the term “colloid” only refers to the particles in the mixture and not the entire suspension.

[0713] The term “average diameter” or “mean diameter” refers to the mean hydrodynamic diameter of particles as measured by dynamic laser light scattering (DLS) with data analysis using the so-called cumulant algorithm, which provides as results the so-called Z-average with the dimension of a length, and the polydispersity index (PI), which is dimensionless (Koppel, D., J. Chem. Phys. 57, 1972, pp 4814-4820, ISO 13321, which is herein incorporated by reference). Here “average diameter,” “mean diameter,” “diameter,” or “size” for particles is used synonymously with this value of the Z-average.

[0714] The “polydispersity index” is preferably calculated based on dynamic light scattering measurements by the so-called cumulant analysis as mentioned in the definition of the “average diameter.” Under certain prerequisites, it can be taken as a measure of the size distribution of an ensemble of ribonucleic acid nanoparticles (e.g., ribonucleic acid nanoparticles).

[0715] Different types of nucleic acid particles have been described previously to be suitable for delivery of nucleic acid in particulate form (e.g., Kaczmarek, J. C. et al., 2017, Genome Medicine 9, 60, which is herein incorporated by reference). For non-viral nucleic acid delivery vehicles, nanoparticle encapsulation of nucleic acid physically protects nucleic acid from degradation and, depending on the specific chemistry, can aid in cellular uptake and endosomal escape.

[0716] The present disclosure describes particles comprising nucleic acid (e.g., a polyribonucleotide), at least one cationic or cationically ionizable lipid or lipid-like material, and/or at least one cationic polymer which associate with the nucleic acid (e.g., a polyribonucleotide) to form nucleic acid particles (e.g., ribonucleic acid particles, e.g., ribonucleic acid nanoparticles) and compositions comprising such particles. The nucleic acid particles (e.g., ribonucleic acid particles, e.g., ribonucleic acid nanoparticles) may comprise nucleic acid (e.g., a polyribonucleotide) which is complexed in different forms by non-covalent interactions to the particle. The particles described herein are not viral particles, in particular, they are not infectious viral particles, i.e., they are not able to virally infect cells.

[0717] Some embodiments described herein relate to compositions, methods and uses involving more than one, e.g., 2, 3, 4, 5, 6 or even more nucleic acid species (e.g., polyribonucleotide species).

[0718] In a nucleic acid particle (e.g., ribonucleic acid particle, e.g., ribonucleic acid nanoparticle) formulation, it is possible that each nucleic acid species (e.g., polyribonucleotide species) is separately formulated as an individual nucleic acid particle (e.g., ribonucleic acid particle, e.g., ribonucleic acid nanoparticle) formulation. In that case, each individual nucleic acid particle (e.g., ribonucleic acid particle, e.g., ribonucleic acid nanoparticle) formulation will comprise one nucleic acid species (e.g., polyribonucleotide species). The individual nucleic acid particle (e.g., ribonucleic acid particle, e.g., ribonucleic acid nanoparticle) formulations may be present as separate entities, e.g., in separate containers. Such formulations are obtainable by providing each nucleic acid species (e.g., polyribonucleotide species) separately (typically each in the form of a nucleic acid-containing solution) together with a particle-forming agent, thereby allowing the formation of particles. Respective particles will contain exclusively the specific nucleic acid species (e.g., polyribonucleotide species) that is being provided when the particles are formed (individual particulate formulations).

[0719] In some embodiments, a composition such as a pharmaceutical composition comprises more than one individual nucleic acid particle (e.g., ribonucleic acid particle, e.g., ribonucleic acid nanoparticle) formulation. Respective pharmaceutical compositions are referred to as “mixed particulate formulations.” Mixed particulate formulations according to the invention are obtainable by forming, separately, individual nucleic acid particle (e.g., ribonucleic acid particle, e.g., ribonucleic acid nanoparticle) formulations, as described above, followed by a step of mixing of the individual nucleic acid particle (e.g., ribonucleic acid particle, e.g., ribonucleic acid nanoparticle) formulations. By the step of mixing, a formulation comprising a mixed population of nucleic acid-containing particles is obtainable. Individual nucleic acid particle (e.g., ribonucleic acid particle, e.g., ribonucleic acid nanoparticle) populations may be together in one container, comprising a mixed population of individual nucleic acid particle (e.g., ribonucleic acid particle, e.g., ribonucleic acid nanoparticle) formulations.

[0720] Alternatively, it is possible that different nucleic acid species (e.g., polyribonucleotide species) are formulated together as a “combined particulate formulation.” Such formulations are obtainable by providing a combined formulation (typically combined solution) of different nucleic acid species (e.g., polyribonucleotide species) species together with a particle-forming agent, thereby allowing the formation of particles. As opposed to a “mixed particulate formulation,” a “combined particulate formulation” will typically comprise particles that comprise more than one nucleic acid species (e.g., polyribonucleotide species) species. In a combined particulate composition different nucleic acid species (e.g., polyribonucleotide species) are typically present together in a single particle.

[0721] In certain embodiments, nucleic acids (e.g., polyribonucleotides), when present in provided nucleic acid particles (e.g., ribonucleic acid particles, e.g., lipid nanoparticles) are resistant in aqueous solution to degradation with a nuclease.

[0722] In some embodiments, nucleic acid particles (e.g., ribonucleic acid particles) are lipid nanoparticles. In some embodiments, lipid nanoparticles are liver-targeting lipid nanoparticles. In some embodiments, lipid nanoparticles are cationic lipid nanoparticles comprising one or more cationic lipids (e.g., ones described herein). In some embodiments, cationic lipid nanoparticles may comprise at least one cationic lipid, at least one polymer-conjugated lipid, and at least one helper lipid (e.g., at least one neutral lipid).

### 1. Cationic Polymeric Materials

[0723] Cationic polymers have been recognized as useful for developing such delivery vehicles, as reported in PCT App. Pub. No. WO 2021/001417, the entirety of which is incorporated herein by reference. As used herein, the term “polymer” refers to a composition comprising one or more molecules that comprise repeating units of one or more monomers. As used herein, “polymer,” “polymeric material,” and “polymer composition” are used interchangeably, and unless otherwise specified, refer to a composition of polymer molecules. A person of skill in the art will appreciate that a polymer composition comprises polymer molecules having molecules of different lengths (e.g., comprising varying amounts of monomers). Polymer compositions described herein are characterized by one or more of a normalized molecular weight (Mn), a weight average molecular weight (Mw), and/or a polydispersity index (PDI). In some embodiments, such repeat units can all be identical (a “homopolymer”); alternatively, in some cases, there can be more than one type of repeat unit present within the polymeric material (a “heteropolymer” or a “copolymer”). In some cases, a polymer is biologically derived, e.g., a biopolymer such as a protein. In some cases, additional moieties can also be present in the polymeric material, for example targeting moieties such as those described herein.

[0724] In some embodiments, a polymer utilized in accordance with the present disclosure may be a copolymer. Repeat units forming the copolymer can be arranged in any fashion. For example, in some embodiments, repeat units can be arranged in a random order; alternatively or additionally, in some embodiments, repeat units may be arranged in an alternating order, or as a “block” copolymer, e.g., comprising one or more regions each comprising a first repeat unit (e.g., a first block), and one or more regions each comprising a second repeat unit (e.g., a second block), etc. Block copolymers can have two (a diblock copolymer), three (a triblock copolymer), or more numbers of distinct blocks.

[0725] In certain embodiments, a polymeric material for use in accordance with the present disclosure is biocompatible. In certain embodiments, a biocompatible material is biodegradable, e.g., is able to degrade, chemically and/or biologically, within a physiological environment, such as within the body.

[0726] In certain embodiments, a polymeric material may be or comprise protamine or polyalkyleneimine.

[0727] As those skilled in the art are aware term “protamine” is often used to refer to any of various strongly basic proteins of relatively low molecular weight that are rich in arginine and are found associated especially with DNA in place of somatic histones in the sperm cells of various animals (as fish). In particular, the term “protamine” is often used to refer to proteins found in fish sperm that are strongly basic, are soluble in water, are not coagulated by heat, and yield chiefly arginine upon hydrolysis. In purified form, they are used in a long-acting formulation of insulin and to neutralize the anticoagulant effects of heparin.

[0728] In some embodiments, the term “protamine” as used herein is refers to a protamine amino acid sequence obtained or derived from natural or biological sources, including fragments thereof and/or multimeric forms of said amino acid sequence or fragment thereof, as well as (synthesized) polypeptides which are artificial and specifically designed for specific purposes and cannot be isolated from native or biological sources.

[0729] In some embodiments, a polyalkyleneimine comprises polyethylenimine (PEI) and/or polypropylenimine. In some embodiments, a preferred polyalkyleneimine is polyethyleneimine (PEI). In some embodiments, the average molecular weight of PEI is preferably 0.75.102 to 107 Da, preferably 1000 to 105 Da, more preferably 10000 to 40000 Da, more preferably 15000 to 30000 Da, even more preferably 20000 to 25000 Da.

[0730] Cationic materials (e.g., polymeric materials, including polycationic polymers) contemplated for use herein include those which are able to electrostatically bind nucleic acid. In some embodiments, cationic polymeric materials contemplated for use herein include any cationic polymeric materials with which nucleic acid can be associated, e.g., by forming complexes with the nucleic acid or forming vesicles in which the nucleic acid is enclosed or encapsulated.

[0731] In some embodiments, particles described herein may comprise polymers other than cationic polymers, e.g., non-cationic polymeric materials and/or anionic polymeric materials. Collectively, anionic and neutral polymeric materials are referred to herein as non-cationic polymeric materials.

### 2. Lipid Particles

[0732] The terms “lipid” and “lipid-like material” are used herein to refer to molecules that comprise one or more hydrophobic moieties or groups and optionally also one or more hydrophilic moieties or groups. Molecules comprising hydrophobic moieties and hydrophilic moieties are also frequently denoted as amphiphiles. Lipids are usually poorly soluble in water. In an aqueous environment, the amphiphilic nature allows the molecules to self-assemble into organized structures and different phases. One of those phases consists of lipid bilayers, as they are present in vesicles, multilamellar/unilamellar liposomes, or membranes in an aqueous environment. Hydrophobicity can be conferred by the inclusion of apolar groups that include, but are not limited to, long-chain saturated and unsaturated aliphatic hydrocarbon groups and such groups substituted by one or more aromatic, cycloaliphatic, or heterocyclic group(s). In some embodiments, hydrophilic groups may comprise polar and/or charged groups and include carbohydrates, phosphate, carboxylic, sulfate, amino, sulfhydryl, nitro, hydroxyl, and other like groups.

[0733] Lipid nanoparticles (also referred to as “lipid nanoparticles”) of the present disclosure comprise (i) a cationic lipid; (ii) a polymer-conjugated lipid, and (iii) one or more helper lipids. Lipid nanoparticles described herein are useful for the delivery of nucleic acid cargo (e.g., a polyribonucleotide) into the cell of a subject. In some embodiments, lipid nanoparticles comprising a nucleic acid (e.g., a polyribonucleotide) described herein are useful for causing increased expression of a protein (e.g., an antibody agent) in a subject. In some embodiments, lipid nanoparticles comprising a nucleic acid (e.g., a polyribonucleotide) described herein are useful for causing a pharmacological effect induced by expression of a protein in a subject. Lipid nanoparticles described herein are characterized by molar percentage (mol %) of components in the lipid nanoparticle. A mol % used in reference to a lipid component of a lipid nanoparticle is relative to the total other lipid components in the lipid nanoparticle.

a. Cationic lipids

[0734] As described herein, lipid nanoparticles of the present disclosure comprise a cationic lipid. In some embodiments, a lipid nanoparticle for delivery of at least one polyribonucleotide described herein comprises a cationic lipid. A cationic lipid, as described herein, is a lipid that is positively charged or is ionizable, such that the cationic lipid will become positively charged when subjected to particular physiological conditions, e.g., a pH of about 7.4 or less, and can promote lipid aggregation. In some embodiments, a cationic lipid is a lipid comprising one or more amine groups which bear or are capable of bearing a positive charge.

[0735] In some embodiments, a cationic lipid may comprise a cationic, meaning positively charged, headgroup. In some embodiments, a cationic lipid may have a hydrophobic domain (e.g., one or more domains of a neutral lipid or an anionic lipid) provided that the cationic lipid has a net positive charge. In some embodiments, a cationic lipid comprises a polar headgroup, which in some embodiments may comprise one or more amine derivatives such as primary, secondary, and/or tertiary amines, quaternary ammonium, various combinations of amines, amidinium salts, or guanidine and/or imidazole groups as well as pyridinium, piperizine and amino acid headgroups such as lysine, arginine, ornithine and/or tryptophan. In some embodiments, a polar headgroup of a cationic lipid comprises one or more amine derivatives. In some embodiments, a polar headgroup of a cationic lipid comprises a quaternary ammonium. In some embodiments, a headgroup of a cationic lipid may comprise multiple cationic charges. In some embodiments, a headgroup of a cationic lipid comprises one cationic charge.

[0736] In some embodiments, a cationic lipid is selected from 1,2-dimyristoyl-sn-glycero-3-ethylphosphocholine (DMEPC); 2-dimyristoyl-3-trimethylammonium propane (DMTAP); dioleyl ether phosphatidylcholine (DOEPC); N,N-dioleyl-N,N-dimethylammonium chloride (DODAC); N-(2,3-dioleyloxy)propyl)-N,N,N-trimethylammonium chloride (DOTMA); N,N-distearyl-N,N-dimethylammonium bromide (DDAB); N-(2,3dioleoyloxy)propyl)-N,N,N-trimethylammonium chloride (DOTAP); 3-(N—(N′,N′dimethylaminoethane)-carbamoyl)cholesterol (DC-Chol), N-(1-(2,3-dioleoyloxy)propyl)N-2-(sperminecarboxamido)ethyl)-N,N-dimethylammonium trifluoracetate (DOSPA), dioctadecylamidoglycyl carboxyspermine (DOGS), 1,2-dioleoyl-3-dimethylammonium propane (DODAP), N,N-dimethyl-2,3-dioleoyloxy)propylamine (DODMA), and N-(1,2-dimyristyloxyprop-3-yl)-N,N-dimethyl-N-hydroxyethyl ammonium bromide (DMRIE).

[0737] In some embodiments, a cationic lipid is one provided in WO2012/016184, which is incorporated herein by reference in its entirety. For example, in some embodiments, a cationic lipid is selected from 1,2-dilinoleyoxy-3-(dimethylamino)acetoxypropane (DLin-DAC), 1,2-dilinoleyoxy-3morpholinopropane (DLin-MA), 1,2-dilinoleoyl-3-dimethylaminopropane (DLinDAP), 1,2-dilinoleylthio-3-dimethylaminopropane (DLin-S-DMA), 1-linoleoyl-2-linoleyloxy-3dimethylaminopropane (DLin-2-DMAP), 1,2-dilinoleyloxy-3-trimethylaminopropane chloride salt (DLin-TMA.CI), 1,2-dilinoleoyl-3-trimethylaminopropane chloride salt (DLin-TAP.CI), 1,2-dilinoleyloxy-3-(N-methylpiperazino)propane (DLin-MPZ), 3-(N,Ndilinoleylamino)-1,2-propanediol (DLinAP), 3-(N,N-dioleylamino)-1,2-propanediol (DOAP), 1,2-dilinoleyloxo-3-(2-N,N-dimethylamino)ethoxypropane (DLin-EG-DMA), and 2,2-dilinoleyl-4-dimethylaminomethyl-[1,3]-dioxolane (DLin-K-DMA).

[0738] In some embodiments, a cationic lipid is one provided in WO2020/219941, WO2017/075531, WO2016/176330, WO2017/049245, or U.S. Pat. No. 9,670,152, each of which is incorporated herein by reference in its entirety.

[0739] In some embodiments, a cationic lipid is a compound of Formula I:

[chemical structure]

[0740] or a pharmaceutically acceptable salt thereof, wherein:
[0741] one of L¹ or L² is —OC(O)—, —C(O)O—, —C(O)—, —O—, —S(O)ₓ—, —S—S—, —C(O)S—, SC(O)—, —NR^{a}C(O)—, —C(O)NR¹—, —NR^{a}C(O)NR^{a}—, —OC(O)NR^{a}— or —NR^{a}C(O)O—, and the other of L¹ or L² is —OC(O)—, —C(O)O—, —C(O)—, —O—, —S(O)ₓ—, —S—S—, —C(O)S—, SC(O)—, —NR^{a}C(O)—, —C(O)NR^{a}—, —NR^{a}C(O)NR^{a}—, —OC(O)NR^{a}—, —NR^{a}C(O)O—, or a direct bond;
   [0742] G¹ and G² are each independently unsubstituted C₁-C₁₂ alkylene or C₁-C₁₂ alkenylene;
   [0743] G³ is C₁-C₂₄ alkylene, C₁-C₂₄ alkenylene, C₃-C₈ cycloalkylene, C₃-C₈ cycloalkenylene;
   [0744] Ra is H or C₁-C₁₂ alkyl;
   [0745] R¹ and R² are each independently C₆-C₂₄ alkyl or C₆-C₂₄ alkenyl;
   [0746] R³ is H, OR⁵, CN, —C(O)OR⁴, —OC(O)R⁴ or —R⁵C(O)R⁴;
   [0747] R⁴ is C₁-C₁₂ alkyl;
   [0748] R⁵ is H or C₁-C₆ alkyl; and
   [0749] x is 0, 1 or 2.

[0750] In some embodiments, one of L¹ or L² is —OC(O)— or —C(O)O—. In some embodiments, each of L¹ and L² is —OC(O)— or —C(O)O—.

[0751] In some embodiments, G¹ is C₁-C₁₂ alkylene. In some embodiments, G² is C₁-C₁₂ alkylene. In some embodiments G¹ and G² are each independently C₁-C₁₂ alkylene. In some embodiments G¹ and G² are each independently C₅-C₁₂ alkylene.

[0752] In some embodiments, G³ is C₁-C₂₄ alkylene. In some embodiments, G³ is C₁-C₆ alkylene.

[0753] In some embodiments, R¹ and R² are each independently selected from:

[chemical structure]

[0754] In some embodiments, R³ is OH.

[0755] In some embodiments, each of L¹ and L² is —OC(O)—, G¹ and G² are each independently C₅-C₁₂ alkylene, G³ is C₁-C₆ alkylene, R³ is OH, and R¹ and R² are each independently selected from:

[chemical structure]

[0756] In some embodiments, a cationic lipid is a compound of Formula Ia or Ib

[chemical structure]

[0757] or a pharmaceutically acceptable salt thereof, where n is an integer from 1 to 15, A is C₃-C₈ cycloaliphatic, each R6 is independently selected from H, OH, and C1-C24 aliphatic, and wherein R1, R2, R3, L1, L2, G1, and G2 are as described in classes and subclasses herein, both singly and in combination.

[0758] In some embodiments, a positively charged lipid structure described herein may also include one or more other components that may be typically used in the formation of vesicles (e.g. for stabilization). Examples of such other components includes, without being limited thereto, fatty alcohols, fatty acids, and/or cholesterol esters or any other pharmaceutically acceptable excipients which may affect the surface charge, the membrane fluidity and assist in the incorporation of the lipid into the lipid assembly. Examples of sterols include cholesterol, cholesteryl hemisuccinate, cholesteryl sulfate, or any other derivatives of cholesterol. Preferably, the at least one cationic lipid comprises DMEPC and/or DOTMA.

[0759] In some embodiments, a cationic lipid is ionizable such that it can exist in a positively charged form or neutral form depending on pH. Such ionization of a cationic lipid can affect the surface charge of the lipid particle under different pH conditions, which in some embodiments may influence plasma protein absorption, blood clearance, and/or tissue distribution as well as the ability to form endosomolytic non-bilayer structures. Accordingly, in some embodiments, a cationic lipid may be or comprise a pH responsive lipid. In some embodiments a pH responsive lipid is a fatty acid derivative or other amphiphilic compound which is capable of forming a lyotropic lipid phase, and which has a pKa value between pH 5 and pH 7.5. This means that the lipid is uncharged at a pH above the pKa value and positively charged below the pKa value. In some embodiments, a pH responsive lipid may be used in addition to or instead of a cationic lipid for example by binding one or more polyribonucleotides to a lipid or lipid mixture at low pH. pH responsive lipids include, but are not limited to, 1,2-dioleyloxy-3-dimethylamino-propane (DODMA).

[0760] In some embodiments, a lipid nanoparticle may comprise one or more cationic lipids as described in WO 2017/075531 (e.g., as presented in Tables 1 and 3 therein) and WO 2018/081480 (e.g., as presented in Tables 1-4 therein), the entire contents of each of which are incorporated herein by reference for the purposes described herein.

[0761] In some embodiments, a cationic lipid that may be useful in accordance with the present disclosure is an amino lipid comprising a titratable tertiary amino head group linked via ester bonds to at least two saturated alkyl chains, which ester bonds can be hydrolyzed easily to facilitate fast degradation and/or excretion via renal pathways. In some embodiments, such an amino lipid has an apparent pKₐ of about 6.0-6.5 (e.g., in one embodiment with an apparent pKa of approximately 6.25), resulting in an essentially fully positively charged molecule at an acidic pH (e.g., pH 5). In some embodiments, such an amino lipid, when incorporated in lipid nanoparticle, can confer distinct physicochemical properties that regulate particle formation, cellular uptake, fusogenicity and/or endosomal release of polyribonucleotide(s). In some embodiments, introduction of an aqueous RNA solution to a lipid mixture comprising such an amino lipid at pH 4.0 can lead to an electrostatic interaction between the negatively charged RNA backbone and the positively charged cationic lipid. Without wishing to be bound by any particular theory, such electrostatic interaction leads to particle formation coincident with efficient encapsulation of RNA drug substance. After RNA encapsulation, adjustment of the pH of the medium surrounding the resulting lipid nanoparticle to a more neutral pH (e.g., pH 7.4) results in neutralization of the surface charge of the lipid nanoparticle. When all other variables are held constant, such charge-neutral particles display longer in vivo circulation lifetimes and better delivery to hepatocytes compared to charged particles, which are rapidly cleared by the reticuloendothelial system. Upon endosomal uptake, the low pH of the endosome renders lipid nanoparticle comprising such an amino lipid fusogenic and allows the release of the RNA into the cytosol of the target cell.

[0762] In some embodiments, a cationic lipid that may be useful in accordance with the present disclosure has one of the structures set forth in Table 10 below:

TABLE 10
Exemplary cationic lipids

| No. | Structure |
|---|---|
| I-1 | [chemical structure] |
| I-2 | [chemical structure] |
| I-3 | [chemical structure] |
| I-4 | [chemical structure] |
| I-5 | [chemical structure] |
| I-6 | [chemical structure] |
| I-7 | [chemical structure] |
| I-8 | [chemical structure] |
| I-9 | [chemical structure] |
| I-10 | [chemical structure] |
| I-11 | [chemical structure] |
| I-12 | [chemical structure] |
| I-13 | [chemical structure] |
| I-14 | [chemical structure] |
| I-15 | [chemical structure] |
| I-16 | [chemical structure] |
| I-17 | [chemical structure] |
| I-18 | [chemical structure] |
| I-19 | [chemical structure] |
| I-20 | [chemical structure] |
| I-21 | [chemical structure] |
| I-22 | [chemical structure] |
| I-23 | [chemical structure] |
| I-24 | [chemical structure] |
| I-25 | [chemical structure] |
| I-26 | [chemical structure] |
| I-27 | [chemical structure] |
| I-28 | [chemical structure] |
| I-29 | [chemical structure] |
| I-30 | [chemical structure] |
| I-31 | [chemical structure] |
| I-32 | [chemical structure] |
| I-33 | [chemical structure] |
| I-34 | [chemical structure] |
| I-35 | [chemical structure] |
| I-36 | [chemical structure] |
| I-37 | [chemical structure] |
| I-38 | [chemical structure] |
| I-39 | [chemical structure] |
| I-40 | [chemical structure] |
| I-41 | [chemical structure] |
| I-42 | [chemical structure] |
| I-43 | [chemical structure] |
| I-44 | [chemical structure] |
| I-45 | [chemical structure] |
| I-46 | [chemical structure] |
| I-47 | [chemical structure] |
| I-48 | [chemical structure] |
| I-49 | [chemical structure] |

[0763] or a pharmaceutically acceptable salt thereof. In some embodiments, provided compounds are provided and/or utilized in a salt form (e.g., a pharmaceutically acceptable salt form). Reference to a compound provided herein is understood to include reference to salts thereof, unless otherwise indicated.

[0764] In certain embodiments, a cationic lipid that may be useful in accordance with the present disclosure is or comprises ((3-hydroxypropyl)azanediyl)bis(nonane-9,1-diyl) bis(2-butyloctanoate) with a chemical structure in Table 10 above as 1-45.

[0765] In some embodiments, a cationic lipid is selected from DODAC, DOTMA, DDAB, DOTAP, DC-Chol, DMRIE, I-3, I-45, and combinations thereof.

[0766] In some embodiments, a cationic lipid is I-3. In some embodiments, a cationic lipid is I-45. In some embodiments, a cationic lipid is SM-102. In some embodiments, a cationic lipid is DODAC. In some embodiments, a cationic lipid is DOTMA. In some embodiments, a cationic lipid is DDAB. In some embodiments, a cationic lipid is DOTAP. In some embodiments, a cationic lipid is DC-Chol.

[0767] In some embodiments, lipid nanoparticles of the present disclosure comprise about 30 to about 70 mol % of a cationic lipid. In some embodiments, an lipid nanoparticle comprises about 35 to about 65 mol % of a cationic lipid. In some embodiments, an lipid nanoparticle comprises about 40 to about 60 mol % of a cationic lipid. In some embodiments, an lipid nanoparticle comprises about 41 to about 49 mol % of a cationic lipid. In some embodiments, an lipid nanoparticle comprises about 48 mol % of a cationic lipid. In some embodiments, an lipid nanoparticle comprises about 50 mol % of a cationic lipid.

[0768] Cationic lipids may be used alone or in combination with neutral lipids, e.g., cholesterol and/or neutral phospholipids, or in combination with other known lipid assembly components.

b. Helper Lipids

[0769] As described herein, lipid nanoparticles of the present disclosure comprise one or more helper lipids. In some embodiments, a lipid nanoparticle for delivery of at least one polyribonucleotide described herein comprises one or more helper lipids. A helper lipid may be a neutral lipid, a positively charged lipid, or a negatively charged lipid. In some embodiments, a helper lipid is a lipid that are useful for increasing the effectiveness of delivery of lipid-based particles such as cationic lipid-based particles to a target cell. In some embodiments, a helper lipid may be or comprise a structural lipid with its concentration chosen to optimize lipid nanoparticle particle size, stability, and/or encapsulation.

[0770] In some embodiments, a lipid nanoparticle for delivery of polyribonucleotide(s) described herein comprises a neutral helper lipid. Examples of such neutral helper lipids include, but are not limited to phosphotidylcholines such as 1,2-distearoyl-sn-glycero-3-phosphocholine (DSPC), 1,2-Dipalmitoyl-sn-glycero-3-phosphocholine (DPPC), 1,2-Dimyristoyl-sn-glycero-3-phosphocholine (DMPC), 1-palmitoyl-2-oleoyl-sn-glycero-3-phosphocholine (POPC), 1,2-dioleoyl-sn-glycero-3-phosphocholine (DOPC), phophatidylethanolamines such as 1,2-dioleoyl-sn-glycero-3-phosphoethanolamine (DOPE), sphingomyelins (SM), ceramides, cholesterol, steroids such as sterols and their derivatives. In some embodiments, a steroid is a sterol. In some embodiments, a sterol is cholesterol.

[0771] Neutral lipids may be synthetic or naturally derived. Other neutral helper lipids that are known in the art, e.g., as described in WO 2017/075531 and WO 2018/081480, the entire contents of each of which are incorporated herein by reference for the purposes described herein, can also be used in lipid nanoparticles described herein. In some embodiments, a lipid nanoparticle for delivery of polyribonucleotide(s) described herein comprises DSPC and/or cholesterol.

[0772] In some embodiments, a lipid nanoparticle described herein comprises multiple neutral lipids (e.g., two neutral lipids). It is understood that reference to “a” neutral lipid is intended to refer to lipid nanoparticles that comprise one or more neutral lipids. In some embodiments, a lipid nanoparticle described herein comprises a phospholipid and/or a steroid. In some embodiments, a lipid nanoparticle described herein comprises DSPC and/or cholesterol.

[0773] In some embodiments, a lipid nanoparticle comprises about 5 to about 15 mol % of a phospholipid. In some embodiments, a lipid nanoparticle comprises about 8 to about 12 mol % of a phospholipid. In some embodiments, a lipid nanoparticle comprises about 10 mol % of a phospholipid. In some embodiments, a lipid nanoparticle comprises about 5 to about 15 mol % of DSPC. In some embodiments, a lipid nanoparticle comprises about 8 to about 12 mol % of DSPC. In some embodiments, a lipid nanoparticle comprises about 10 mol % of DSPC.

[0774] In some embodiments, a lipid nanoparticle comprises about 30 to about 50 mol % of a steroid. In some embodiments, a lipid nanoparticle comprises about 35 to about 45 mol % of a steroid. In some embodiments, a lipid nanoparticle comprises about 38 to about 40 mol % of a steroid. In some embodiments, a lipid nanoparticle comprises about 38.5 mol % of a steroid. In some embodiments, a lipid nanoparticle comprises about 40 mol % of a steroid.

[0775] In some embodiments, a lipid nanoparticle comprises about 30 to about 50 mol % of cholesterol. In some embodiments, a lipid nanoparticle comprises about 35 to about 45 mol % of cholesterol. In some embodiments, a lipid nanoparticle comprises about 38 to about 41 mol % of cholesterol. In some embodiments, a lipid nanoparticle comprises about 38.5 mol % of cholesterol. In some embodiments, a lipid nanoparticle comprises about 40.7 mol % of cholesterol.

[0776] In some embodiments, a lipid nanoparticle comprises about 5 to about 15 mol % of phospholipid and about 30 to about 50 mol % of steroid.

[0777] In some embodiments, a lipid nanoparticle for delivery of at least one polyribonucleotide described herein comprises at least two helper lipids (e.g., ones described herein). In some such embodiments, a lipid nanoparticle for delivery of at least one polyribonucleotide described herein comprises DSPC and cholesterol.

c. Polymer-Conjugated Lipids

[0778] As described herein, lipid nanoparticles of the present disclosure comprise a polymer-conjugated lipid. In some embodiments, a lipid nanoparticle for delivery of at least one polyribonucleotide described herein comprises a polymer-conjugated lipid. A polymer-conjugated lipid is typically a molecule comprising a lipid portion and a polymer portion conjugated thereto.

[0779] In some embodiments, a polymer-conjugated lipid is a PEG-conjugated lipid. In some embodiments, a PEG-conjugated lipid is designed to sterically stabilize a lipid particle by forming a protective hydrophilic layer that shields the hydrophobic lipid layer. In some embodiments, a PEG-conjugated lipid can reduce its association with serum proteins and/or the resulting uptake by the reticuloendothelial system when such lipid particles are administered in vivo.

[0780] In some embodiments, a PEG lipid is selected from pegylated diacylglycerol (PEG-DAG) such as I-(monomethoxy-polyethyleneglycol)-2,3-dimyristoylglycerol (PEG-DMG) (e.g., 1,2-dimyristoyl-rac-glycero-3-methoxypolyethylene glycol-2000 (PEG2000-DMG)), a pegylated phosphatidylethanoloamine (PEG-PE), a PEG succinate diacylglycerol (PEG-S-DAG) such as 4-O-(2′,3′-di(tetradecanoyloxy)propyl-1-O-(ω-methoxy(polyethoxy)ethyl)butanedioate (PEG-S-DMG), a pegylated ceramide (PEG-cer), or a PEG dialkoxypropylcarbamate such as co-m ethoxy (polyethoxy)ethyl-N-(2,3-di(tetradecanoxy)propyl)carbamate, and 2,3-di(tetradecanoxy)propy 1-N-(co methoxy(polyethoxy)ethyl)carbamate.

[0781] Certain PEG-conjugated lipids (also known as PEGylated lipids) were clinically approved with safety demonstrated in clinical trials. PEG-conjugated lipids are known to affect cellular uptake, a prerequisite to endosomal localization and payload delivery. The present disclosure, among other things, provides an insight that the pharmacology of encapsulated nucleic acid can be controlled in a predictable manner by modulating the alkyl chain length of a PEG-lipid anchor. In some embodiments, the present disclosure, among other things, provides an insight that such PEG-conjugated lipids may be selected for an polyribonucleotide/lipid nanoparticle drug product formulation to provide optimum delivery of polyribonucleotides to the liver. In some embodiments, such PEG-conjugated lipids may be designed and/or selected based on reasonable solubility characteristics and/or its molecular weight to effectively perform the function of a steric barrier. For example, in some embodiments, such a PEGylated lipid does not show appreciable surfactant or permeability enhancing or disturbing effects on biological membranes. In some embodiments, PEG in such a PEG-conjugated lipid can be linked to diacyl lipid anchors with a biodegradable amide bond, thereby facilitating fast degradation and/or excretion. In some embodiments, a lipid nanoparticle comprising a PEG-conjugated lipid retain a full complement of a PEGylated lipid. In the blood compartment, such a PEGylated lipid dissociates from the particle over time, revealing a more fusogenic particle that is more readily taken up by cells, ultimately leading to release of the RNA payload.

[0782] In some embodiments, a PEG-lipid is PEG2000-DMG:

[chemical structure]

[0783] In some embodiments, a lipid nanoparticle may comprise one or more PEG-conjugated lipids or pegylated lipids as described in WO 2017/075531 and WO 2018/081480, the entire contents of each of which are incorporated herein by reference for the purposes described herein. For example, in some embodiments, a PEG-conjugated lipid that may be useful in accordance with the present disclosure can have a structure

[chemical structure]

as described in WO 2017/075531, or a pharmaceutically acceptable salt, tautomer or stereoisomer thereof, wherein: R₈ and R₉ are each independently a straight or branched, saturated or unsaturated alkyl chain containing from 10 to 30 carbon atoms, wherein the alkyl chain is optionally interrupted by one or more ester bonds; and w has a mean value ranging from 30 to 60. In some embodiments, R₈ and R₉ are each independently straight, saturated alkyl chains containing from 12 to 16 carbon atoms. In some embodiments, w has a mean value ranging from 43 to 53. In some embodiments, w is an integer from 40 to 50. In some embodiments, w is 45 to 47. In other embodiments, the average w is about 45. In some embodiments, a PEG-conjugated lipid is or comprises 2-[(Polyethylene glycol)-2000]-N,N-ditetradecylacetamide with a chemical structure as shown as I-3 in Table 9 above and below:

[chemical structure]

[0784] or a pharmaceutically acceptable salt thereof, where n′ is an integer from 45 to 50.

[0785] In some embodiments, a PEG-lipid is selected from PEG-DAG, PEG-PE, PEG-S-DAG, PEG2000-DMG, PEG-cer, a PEG dialkyoxypropylcarbamate, ALC-0159, and combinations thereof. In some embodiments, a PEG-lipid is ALC-0159 or PEG2000-DMG. In some embodiments, a PEG-lipid is ALC-0159. In some embodiments, a PEG-lipid is PEG2000-DMG. In some embodiments, a PEG-lipid is PEG-DAG. In some embodiments, a PEG-lipid is PEG-PE. In some embodiments, a PEG-lipid is PEG-S-DAG. In some embodiments, a PEG-lipid is PEG-cer. In some embodiments, a PEG-lipid is a PEG dialkyoxypropylcarbamate.

[0786] In some embodiments, a PEG group that is part of a PEG-lipid has, on average in a composition comprising one or more PEG-lipid molecules, a number average molecular weight (Mn) of about 2000 g/mol.

[0787] In some embodiments, a PEG-lipid is about 0.5 to about 5 mol % relative to total lipids in the lipid nanoparticle. In some embodiments, a lipid nanoparticle comprises about 1.0 to about 2.5 mol % of a PEG-lipid. In some embodiments, a lipid nanoparticle comprises about 1.5 to about 2.0 mol % of a PEG-lipid. In some embodiments, a lipid nanoparticle comprises about 1.5 to about 1.8 mol % of a PEG-lipid.

[0788] In some embodiments, a molar ratio of total cationic lipid to total polymer-conjugated lipid (e.g., PEG-conjugated lipid) is from about 100:1 to about 20:1. In some embodiments, a molar ratio of total cationic lipid to total polymer-conjugated lipid (e.g., PEG-conjugated lipid) is from about 50:1 to about 20:1. In some embodiments, a molar ratio of total cationic lipid to total polymer-conjugated lipid (e.g., PEG-conjugated lipid) is from about 40:1 to about 20:1. In some embodiments, a molar ratio of total cationic lipid to total polymer-conjugated lipid (e.g., PEG-conjugated lipid) is from about 35:1 to about 25:1.

[0789] In some embodiments, a lipid nanoparticle comprises i) about 30 to about 50 mol % of the cationic lipid; ii) about 1 to about 5 mol % of a PEG-lipid; iii) about 5 to about 15 mol % of a neutral lipid; and iv) about 30 to about 50 mol % of a steroid. In some embodiments, a lipid nanoparticle comprises: i) about 30% to about 50% by weight of ALC-0315; ii) about 1% to about 5% by weight of a ALC-0159; iii) about 5% to about 15% by weight of DSPC; and iv) about 30 to about 50 mol % of cholesterol.

[0790] In some embodiments, an lipid nanoparticle comprises: i) about 47.5 mol % of ALC-0315; ii) about 1.8 mol % of a ALC-0159; iii) about 10 mol % of DSPC; and iv) about 40.7 mol % of cholesterol.

[0791] In some embodiments, a lipid nanoparticle comprises: i) about 30 to about 50 mol % of SM-102; ii) about 1 to about 5 mol % of a PEG2000-DMG; iii) about 5 to about 15 mol % of DSPC; and iv) about 30 to about 50 mol % of a steroid. In some embodiments, a lipid nanoparticle comprises i) about 50 mol % of SM-102; ii) about 1.5 mol % of PEG2000-DMG; iii) about 10 mol % of DSPC; and iv) about 38.5 mol % of cholesterol.

### 3. Exemplary Lipid Nanoparticle Compositions

[0792] In some embodiments, lipids that form lipid nanoparticles described herein comprise: a polymer-conjugated lipid; a cationic lipid; and at least one helper lipid. In some such embodiments, total polymer-conjugated lipid may be present in about 0.5-5 mol %, about 0.7-3.5 mol %, about 1-2.5 mol %, about 1.5-2 mol %, or about 1.5-1.8 mol % of the total lipids. In some embodiments, total polymer-conjugated lipid may be present in about 1-2.5 mol % of the total lipids. In some embodiments, the molar ratio of total cationic lipid to total polymer-conjugated lipid (e.g., PEG-conjugated lipid) may be about 100:1 to about 20:1, or about 50:1 to about 20:1, or about 40:1 to about 20:1, or about 35:1 to about 25:1. In some embodiments, the molar ratio of total cationic lipid to total polymer-conjugated lipid may be about 35:1 to about 25:1.

[0793] In some embodiments involving a polymer-conjugated lipid, a cationic lipid, and a helper neutral lipid in lipid nanoparticles described herein, total cationic lipid is present in about 35-65 mol %, about 40-60 mol %, about 41-49 mol %, about 41-48 mol %, about 42-48 mol %, about 43-48 mol %, about 44-48 mol %, about 45-48 mol %, about 46-48 mol %, or about 47.2-47.8 mol % of the total lipids. In certain embodiments, total cationic lipid is present in about 47.0, 47.1, 47.2, 47.3, 47.4, 47.5, 47.6, 47.7, 47.8, 47.9 or 48.0 mol % of the total lipids.

[0794] In some embodiments involving a polymer-conjugated lipid, a cationic lipid, and a helper neutral lipid in lipid nanoparticles described herein, total neutral lipid is present in about 35-65 mol %, about 40-60 mol %, about 45-55 mol %, or about 47-52 mol % of the total lipids. In some embodiments, total neutral lipid is present in 35-65 mol % of the total lipids. In some embodiments, total non-steroid neutral lipid (e.g., DPSC) is present in about 5-15 mol %, about 7-13 mol %, or 9-11 mol % of the total lipids. In some embodiments, total non-steroid neutral lipid is present in about 9.5, 10 or 10.5 mol % of the total lipids. In some embodiments, the molar ratio of the total cationic lipid to the non-steroid neutral lipid ranges from about 4.1: 1.0 to about 4.9: 1.0, from about 4.5: 1.0 to about 4.8: 1.0, or from about 4.7: 1.0 to 4.8: 1.0. In some embodiments, total steroid neutral lipid (e.g., cholesterol) is present in about 35-50 mol %, about 39-49 mol %, about 40-46 mol %, about 40-44 mol %, or about 40-42 mol % of the total lipids. In certain embodiments, total steroid neutral lipid (e.g., cholesterol) is present in about 39, 40, 41, 42, 43, 44, 45, or 46 mol % of the total lipids. In certain embodiments, the molar ratio of total cationic lipid to total steroid neutral lipid is about 1.5:1 to 1: 1.2, or about 1.2: 1 to 1: 1.2.

[0795] In some embodiments, a lipid composition comprising a cationic lipid, a polymer-conjugated lipid, and a neutral lipid can have individual lipids present in certain molar percents of the total lipids, or in certain molar ratios (relative to each other) as described in WO 2018/081480, the entire contents of each of which are incorporated herein by reference for the purposes described herein.

[0796] In some embodiments, lipids that form the lipid nanoparticles comprise: a polymer-conjugated lipid (e.g., PEG-conjugated lipid); a cationic lipid; and a neutral lipid, wherein the polymer-conjugated lipid is present in about 1-2.5 mol % of the total lipids; the cationic lipid is present in 35-65 mol % of the total lipids; and the neutral lipid is present in 35-65 mol % of the total lipids. In some embodiments, lipids that form the lipid nanoparticles comprise: a polymer-conjugated lipid (e.g., PEG-conjugated lipid); a cationic lipid; and a neutral lipid, wherein the polymer-conjugated lipid is present in about 1-2 mol % of the total lipids; the cationic lipid is present in 45-48.5 mol % of the total lipids; and the neutral lipid is present in 45-55 mol % of the total lipids. In some embodiments, lipids that form the lipid nanoparticles comprise: a polymer-conjugated lipid (e.g., PEG-conjugated lipid); a cationic lipid; and a neutral lipid comprising a non-steroid neutral lipid and a steroid neutral lipid, wherein the polymer-conjugated lipid is present in about 1-2 mol % of the total lipids; the cationic lipid is present in 45-48.5 mol % of the total lipids; the non-steroid neutral lipid is present in 9-11 mol % of the total lipids; and the steroid neutral lipid is present in about 36-44 mol % of the total lipids. In many of such embodiments, a PEG-conjugated lipid is or comprises 2-[(polyethylene glycol)-2000]-N,N-ditetradecylacetamide or a derivative thereof. In many of such embodiments, a cationic lid is or comprises ((3-hydroxypropyl)azanediyl)bis(nonane-9,1-diyl) bis(2-butyloctanoate) or a derivative thereof. In many of such embodiments, a neutral lipid comprises DSPC and cholesterol, wherein DSPC is a non-steroid neutral lipid and cholesterol is a steroid neutral lipid.

[0797] In some embodiments, lipids that form the lipid nanoparticles comprise: (a) 2-[(polyethylene glycol)-2000]-N,N-ditetradecylacetamide at about 1-2.5 mol % of the total lipids; (b) DPSC and cholesterol, wherein together DPSC and cholesterol are about 35-65 mol % of the total lipids; and (c) ((3-hydroxypropyl)azanediyl)bis(nonane-9,1-diyl) bis(2-butyloctanoate) at about 35-65 mol % of the total lipids.

### B. Exemplary Methods of Making Lipid Nanoparticles

[0798] Lipids and lipid nanoparticles comprising nucleic acids and their method of preparation are known in the art, including, e.g., as described in U.S. Pat. Nos. 8,569,256, 5,965,542 and U.S. Patent Publication Nos. 2016/0199485, 2016/0009637, 2015/0273068, 2015/0265708, 2015/0203446, 2015/0005363, 2014/0308304, 2014/0200257, 2013/086373, 2013/0338210, 2013/0323269, 2013/0245107, 2013/0195920, 2013/0123338, 2013/0022649, 2013/0017223, 2012/0295832, 2012/0183581, 2012/0172411, 2012/0027803, 2012/0058188, 2011/0311583,2011/0311582, 2011/0262527,2011/0216622,2011/0117125, 2011/0091525,2011/0076335, 2011/0060032, 2010/0130588, 2007/0042031, 2006/0240093, 2006/0083780, 2006/0008910, 2005/0175682, 2005/017054, 2005/0118253, 2005/0064595, 2004/0142025, 2007/0042031, 1999/009076 and PCT Pub. Nos. WO 99/39741, WO 2018/081480, WO 2017/004143, WO 2017/075531, WO 2015/199952, WO 2014/008334, WO 2013/086373, WO 2013/086322, WO 2013/016058, WO 2013/086373, WO2011/141705, and WO 2001/07548, the full disclosures of which are herein incorporated by reference in their entirety for the purposes described herein.

[0799] For example, in some embodiments, cationic lipids, neutral lipids (e.g., DSPC, and/or cholesterol) and polymer-conjugated lipids can be solubilized in ethanol at a pre-determined molar ratio (e.g., ones described herein). In some embodiments, lipid nanoparticles (lipid nanoparticle) are prepared at a total lipid to polyribonucleotides weight ratio of approximately 10:1 to 30:1. In some embodiments, such polyribonucleotides can be diluted to 0.2 mg/mL in acetate buffer.

[0800] In some embodiments, using an ethanol injection technique, a colloidal lipid dispersion comprising polyribonucleotides can be formed as follows: an ethanol solution comprising lipids, such as cationic lipids, neutral lipids, and polymer-conjugated lipids, is injected into an aqueous solution comprising polyribonucleotides (e.g., ones described herein).

[0801] In some embodiments, lipid and polyribonucleotide solutions can be mixed at room temperature by pumping each solution at controlled flow rates into a mixing unit, for example, using piston pumps. In some embodiments, the flow rates of a lipid solution and a RNA solution into a mixing unit are maintained at a ratio of 1:3. Upon mixing, nucleic acid-lipid particles are formed as the ethanolic lipid solution is diluted with aqueous polyribonucleotides. The lipid solubility is decreased, while cationic lipids bearing a positive charge interact with the negatively charged RNA.

[0802] In some embodiments, a solution comprising RNA-encapsulated lipid nanoparticles can be processed by one or more of concentration adjustment, buffer exchange, formulation, and/or filtration.

[0803] In some embodiments, RNA-encapsulated lipid nanoparticles can be processed through filtration.

[0804] In some embodiments, particle size and/or internal structure of lipid nanoparticles (with or with ssRNs) may be monitored by appropriate techniques such as, e.g., small-angle X-ray scattering (SAXS) and/or transmission electron cryomicroscopy (CryoTEM).

### V. Pharmaceutical Compositions

[0805] The present disclosure provides compositions, e.g., pharmaceutical compositions comprising one or more polyribonucleotides described herein. Pharmaceutical formulations may additionally comprise a pharmaceutically acceptable excipient, which, as used herein, includes any and all solvents, dispersion media, diluents, or other liquid vehicles, dispersion or suspension aids, surface active agents, isotonic agents, thickening or emulsifying agents, preservatives, solid binders, lubricants and the like, as suited to the particular dosage form desired. Remington's The Science and Practice of Pharmacy, 21st Edition, A. R. Gennaro (Lippincott, Williams & Wilkins, Baltimore, MD, 2006; incorporated herein by reference) discloses various excipients used in formulating pharmaceutical compositions and known techniques for the preparation thereof. Except insofar as any conventional excipient medium is incompatible with a substance or its derivatives, such as by producing any undesirable biological effect or otherwise interacting in a deleterious manner with any other component(s) of the pharmaceutical composition, its use is contemplated to be within the scope of this disclosure.

[0806] In some embodiments, an excipient is approved for use in humans and for veterinary use. In some embodiments, an excipient is approved by the United States Food and Drug Administration. In some embodiments, an excipient is pharmaceutical grade. In some embodiments, an excipient meets the standards of the United States Pharmacopoeia (USP), the European Pharmacopoeia (EP), the British Pharmacopoeia, and/or the International Pharmacopoeia.

[0807] Pharmaceutically acceptable excipients used in the manufacture of pharmaceutical compositions include, but are not limited to, inert diluents, dispersing and/or granulating agents, surface active agents and/or emulsifiers, disintegrating agents, binding agents, preservatives, buffering agents, lubricating agents, and/or oils. Such excipients may optionally be included in pharmaceutical formulations. Excipients such as cocoa butter and suppository waxes, coloring agents, coating agents, sweetening, flavoring, and/or perfuming agents can be present in the composition, according to the judgment of the formulator.

[0808] General considerations in the formulation and/or manufacture of pharmaceutical agents may be found, for example, in Remington: The Science and Practice of Pharmacy 21st ed., Lippincott Williams & Wilkins, 2005 (incorporated herein by reference).

[0809] In some embodiments, pharmaceutical compositions provided herein may be formulated with one or more pharmaceutically acceptable carriers or diluents as well as any other known adjuvants and excipients in accordance with conventional techniques such as those disclosed in Remington: The Science and Practice of Pharmacy 21st ed., Lippincott Williams & Wilkins, 2005 (incorporated herein by reference).

[0810] Pharmaceutical compositions described herein can be administered by appropriate methods known in the art. As will be appreciated by a skilled artisan, the route and/or mode of administration may depend on a number of factors, including, e.g., but not limited to stability and/or pharmacokinetics and/or pharmacodynamics of pharmaceutical compositions described herein.

[0811] In some embodiments, pharmaceutical compositions described herein are formulated for parenteral administration, which includes modes of administration other than enteral and topical administration, usually by injection, and includes, without limitation, intravenous, intramuscular, intraarterial, intradermal, subcutaneous, subcuticular, or intraarticular injection and infusion. In preferred embodiments, pharmaceutical compositions described herein are formulated for intravenous, intramuscular, or subcutaneous administration.

[0812] In some embodiments, pharmaceutical compositions described herein are formulated for intravenous administration. In some embodiments, pharmaceutically acceptable excipients that may be useful for intravenous administration include sterile aqueous solutions or dispersions and sterile powders for preparation of sterile injectable solutions or dispersions.

[0813] Therapeutic compositions typically must be sterile and stable under the conditions of manufacture and storage. The composition can be formulated as a solution, microemulsion, lipid nanoparticles, or other ordered structure suitable to high drug concentration. The carrier can be a solvent or dispersion medium containing, for example, water, ethanol, polyol (for example, glycerol, propylene glycol, and liquid polyethylene glycol, and the like), and suitable mixtures thereof. Proper fluidity can be maintained, for example, by the use of surfactants. In many cases, it will be preferable to include isotonic agents, for example, sugars, polyalcohols such as mannitol, sorbitol, or sodium chloride in the composition. In some embodiments, prolonged absorption of the injectable compositions can be brought about by including in the composition an agent that delays absorption, for example, monostearate salts and gelatin.

[0814] Sterile injectable solutions can be prepared by incorporating the active compound in the required amount in an appropriate solvent with one or a combination of ingredients enumerated above, as required, followed by sterilization and/or microfiltration. In some embodiments, pharmaceutical compositions can be prepared as described herein and/or methods known in the art.

[0815] These compositions may also contain adjuvants such as preservatives, wetting agents, emulsifying agents and dispersing agents. Prevention of the presence of microorganisms may be ensured both by sterilization procedures, and by the inclusion of various antibacterial and antifungal agents, for example, paraben, chlorobutanol, phenol sorbic acid, and the like. It may also be desirable to include isotonic agents, such as sugars, sodium chloride, and the like into pharmaceutical compositions described herein. In addition, prolonged absorption of the injectable pharmaceutical form may be brought about by the inclusion of agents which delay absorption such as aluminum monostearate and gelatin.

[0816] Formulations of pharmaceutical compositions described herein may be prepared by any method known or hereafter developed in the art of pharmacology. In general, such preparatory methods include the step of bringing active ingredient(s) into association with a diluent or another excipient and/or one or more other accessory ingredients, and then, if necessary and/or desirable, shaping and/or packaging the product into a desired single- or multi-dose unit.

[0817] A pharmaceutical composition in accordance with the present disclosure may be prepared, packaged, and/or sold in bulk, as a single unit dose, and/or as a plurality of single unit doses. As used herein, a “unit dose” is discrete amount of the pharmaceutical composition comprising a predetermined amount of at least one RNA product produced using a system and/or method described herein.

[0818] Relative amounts of polyribonucleotides encapsulated in lipid nanoparticles, a pharmaceutically acceptable excipient, and/or any additional ingredients in a pharmaceutical composition can vary, depending upon the subject to be treated, target cells, diseases or disorders, and may also further depend upon the route by which the composition is to be administered.

[0819] In some embodiments, pharmaceutical compositions described herein are formulated into pharmaceutically acceptable dosage forms by conventional methods known to those of skill in the art. Actual dosage levels of the active ingredients (e.g., polyribonucleotides encapsulated in lipid nanoparticles) in the pharmaceutical compositions described herein may be varied so as to obtain an amount of the active ingredient which is effective to achieve the desired therapeutic response for a particular patient, composition, and mode of administration, without being toxic to the patient. The selected dosage level will depend upon a variety of pharmacokinetic factors including the activity of the particular compositions of the present disclosure employed, the route of administration, the time of administration, the rate of excretion of the particular compound being employed, the duration of the treatment, other drugs, compounds and/or materials used in combination with the particular compositions employed, the age, sex, weight, condition, general health and prior medical history of the patient being treated, and like factors well known in the medical arts.

[0820] A physician having ordinary skill in the art can readily determine and prescribe the effective amount of the pharmaceutical composition required. For example, a physician could start doses of active ingredients (e.g., polyribonucleotides encapsulated in lipid nanoparticles) employed in the pharmaceutical composition at levels lower than that required in order to achieve the desired therapeutic effect and gradually increase the dosage until the desired effect is achieved.

[0821] In some embodiments, a pharmaceutical composition described herein is formulated (e.g., but not limited to, for intravenous, intramuscular, or subcutaneous administration) to deliver an active dose that confers a plasma concentration of an antibody agent encoded by at least one polyribonucleotide (e.g., ones described herein) that mediates pharmacological activity via its dominant mode of action, viral neutralization. In some embodiments, the antibody agent is directed against a CD4 binding site of HIV. In some embodiments, a pharmaceutical composition described herein is formulated (e.g., but not limited to, for intravenous, intramuscular, or subcutaneous administration) to deliver an active dose that confers a plasma concentration of at least about 500 ng/mL of an anti-HIV antibody agent (e.g., an anti-HIV antibody agent targeting a CD4 binding site) encoded by at least one polyribonucleotide (e.g., ones described herein) that mediates pharmacological activity via its dominant mode of action, viral neutralization.

[0822] In some embodiments, a pharmaceutical composition is formulated (e.g., but not limited to, for intravenous, intramuscular, or subcutaneous administration) to deliver a dose of 5 mg RNA/kg.

[0823] In some embodiments, a pharmaceutical composition described herein may further comprise one or more additives, for example, in some embodiments that may enhance stability of such a composition under certain conditions. Examples of additives may include but are not limited to salts, buffer substances, preservatives, and carriers. For example, in some embodiments, a pharmaceutical composition may further comprise a cryoprotectant (e.g., sucrose) and/or an aqueous buffered solution, which may in some embodiments include one or more salts, including, e.g., alkali metal salts or alkaline earth metal salts such as, e.g., sodium salts, potassium salts, and/or calcium salts.

[0824] In some embodiments, a pharmaceutical composition described herein may further comprises one or more active agents other than at least one polyribonucleotide encoding an antibody agent directed against an HIV CD4 binding site or an HIV Env trimer apex site. For example, in some embodiments, such an other active agent may be or comprise an antiviral agent. In some embodiments, an exemplary antiviral agent may be one included in Table 1 herein.

[0825] The present disclosure provides the recognition that anti-HIV antibodies may be useful in combination with polyribonucleotides and/or compositions provided herein, for example, for treating or preventing HIV. Exemplary anti-HIV antibodies that can be used with compositions described herein include, but are not limited to, 1-18, PGT121, 3BNC117, b12, 10-1074, 10E8, 10E8v4, VRC01, VRC07-523-L/S, or PGDM1400, fragments thereof, or combinations thereof.

[0826] The present disclosure further provides the insight that combinations of anti-HIV antibody agents can be encoded in polyribonucleotides. Delivery of a combination of anti-HIV antibody agents via delivery of polyribonucleotides can achieve similar titers of antibody agent in the serum or plasma of a subject. Moreover, a combination of anti-HIV antibody agents via delivery of polyribonucleotides can also broadly neutralize various HIV strains.

[0827] In view of these insights, the present disclosure provides compositions comprising one or more polyribonucleotides encoding the heavy chain complementarity determining regions (CDRs) and/or light chain CDRs of PGT121, 3BNC117, b12, 10-1074, 10E8, 10E8v4, VRC01, VRC07-523-L/S, or 1-18 can be used in combination with a polyribonucleotide and/or composition provided herein described. For instance, in some embodiments, one or more polyribonucleotides encoding the heavy chain complementarity determining regions (HCDRs) and/or light chain CDRs (LCDRs) of PGT121, 3BNC117, b12, 10-1074, 10E8, 10E8v4, VRC01, VRC07-523-L/S, or 1-18 can be used in combination with a polyribonucleotide encoding an immunoglobulin chain of an antibody agent, wherein the immunoglobulin chain comprises a heavy chain variable (VH) domain, and the VH domain comprises (a) an HCDR1 comprising an amino acid sequence according to SEQ ID NO: 18; (b) an HCDR2 comprising an amino acid sequence according to SEQ ID NO: 21; and (c) an HCDR3 comprising an amino acid sequence according to SEQ ID NO: 24. In some embodiments, one or more polyribonucleotides encoding the HCDRs and/or LCDRs of PGT121, 3BNC117, b12, 10-1074, 10E8, 10E8v4, VRC01, VRC07-523-L/S, or 1-18 can be used in combination with a polyribonucleotide encoding an immunoglobulin chain of an antibody agent, wherein the immunoglobulin chain comprises a light chain variable (VL) domain, and the VL domain comprises (a) an LCDR1 comprising an amino acid sequence according to SEQ ID NO: 27; (b) an LCDR2 comprising an amino acid sequence according to SEQ ID NO: 30; and (c) an LCDR3 comprising an amino acid sequence according to SEQ ID NO: 33. In some embodiments, one or more polyribonucleotides encoding the HCDRs and/or LCDRs of PGT121, 3BNC117, b12, 10-1074, 10E8, 10E8v4, VRC01, VRC07-523-L/S, or 1-18 can be used in combination with a polyribonucleotide encoding an immunoglobulin chain of an antibody agent, wherein the immunoglobulin chain comprises a heavy chain variable (VH) domain and a light chain variable (VL) domain, wherein the VH domain comprises (a) an HCDR1 comprising an amino acid sequence according to SEQ ID NO: 18; (b) an HCDR2 comprising an amino acid sequence according to SEQ ID NO: 21; and (c) an HCDR3 comprising an amino acid sequence according to SEQ ID NO: 24; and the VL domain comprises (a) an LCDR1 comprising an amino acid sequence according to SEQ ID NO: 27; (b) an LCDR2 comprising an amino acid sequence according to SEQ ID NO: 30; and (c) an LCDR3 comprising an amino acid sequence according to SEQ ID NO: 33. The present disclosure further provides the insight that compositions comprising a combination of such polyribonucleotides can be useful for treating or preventing HIV.

[0828] In some embodiments, a pharmaceutical composition provided herein is a preservative-free, sterile RNA-lipid nanoparticle dispersion in an aqueous buffer for intravenous or intramuscular administration.

[0829] Although the descriptions of pharmaceutical compositions provided herein are principally directed to pharmaceutical compositions that are suitable for administration to humans, it will be understood by the skilled artisan that such compositions are generally suitable for administration to animals of all sorts. Modification of pharmaceutical compositions suitable for administration to humans in order to render the compositions suitable for administration to various animals is well understood, and the ordinarily skilled veterinary pharmacologist can design and/or perform such modification with merely ordinary, if any, experimentation.

### VI. Patient Populations

[0830] Technologies provided herein can be useful for treatment and/or prevention of HIV infection. As described herein, technologies include polyribonucleotides encoding anti-HIV antibody agents, immunoglobulin chains thereof, or fragments thereof. Accordingly, the present disclosure provides pharmaceutical compositions for treatment and/or prevention of HIV. In some embodiments, a pharmaceutical composition comprises a polyribonucleotides as described herein.

[0831] In some embodiments, a subject is one suffering from and/or is susceptible to HIV infection. In some embodiments, a subject may be defined by one or more criterion such as age group, gender, genetic background, preexisting clinical conditions, and/or prior exposure to therapy.

[0832] In some embodiments, a subject may be determined to be classified as needing a pharmaceutical composition described herein in accordance with the screening tools for HIV. For example, in some embodiments, a subject may be determined to be classified as needing a pharmaceutical composition described herein according to the results obtained in HIV-1 enzyme immunoassays (EIA), HIV-1 western blot, an HIV viral neutralization assay (VNT), and/or PCR test.

[0833] In some embodiments, a subject is a model organism. In preferred embodiments, a subject is a human. In some embodiments, a subject is between 18-65 years of age. In some embodiments, a subject is an age in a range of from about 0 months to about 6 months old, from about 6 to about 12 months old, from about 6 to about 18 months old, from about 18 to about 36 months old, from about 1 to about 5 years old, from about 5 to about 10 years old, from about 10 to about 15 years old, from about 15 to about 20 years old, from about 20 to about 25 years old, from about 25 to about 30 years old, from about 30 to about 35 years old, from about 35 to about 40 years old, from about 40 to about 45 years old, from about 45 to about 50 years old, from about 50 to about 55 years old, from about 55 to about 60 years old, from about 60 to about 65 years old, from about 65 to about 70 years old, from about 70 to about 75 years old, from about 75 to about 80 years old, from about 80 to about 85 years old, from about 85 to about 90 years old, from about 90 to about 95 years old, or from about 95 to about 100 years old.

[0834] In some embodiments, a subject is a human infant. In some embodiments, a subject is a human toddler. In some embodiments, a subject is a human child. In some embodiments, a subject is a human adult. In some embodiments, a subject is an elderly human.

[0835] In some embodiments, a subject comprises a specific HIV viral load. In some embodiments, a subject comprises a viral load that is greater than 400 copies/mL (e.g., greater than 400, greater than 500, greater than 1,000, greater than 2,000, greater than 4,000, greater than 8,000, greater than 10,000, greater than 20,000, greater than 40,000, greater than 100,000, or greater than 400,000 copies/mL) in plasma or serum. In some embodiments, a subject comprises an undetectable viral load. In some embodiments, a subject comprises a viral load of <400 copies/mL (e.g., less than 400, less than 300, less than 200, less than 100, less than 75, or less than 50 copies/mL) in plasma or serum.

[0836] In some embodiments, a subject comprises a normal CD4+ T-cell count (i.e., greater than 350 cells/mm³). In some embodiments, a subject comprises an abnormal CD4+ T-cell count. In some embodiments, a subject comprises a CD4+ T-cell count of at least 450 cells/mm³.

[0837] In some embodiments, a subject has not been exposed to HIV. In some embodiments, a subject has or it as risk of developing an HIV infection. In some embodiments, a subject may have had an exposure to HIV. In some embodiments, a subject may have a latent HIV infection.

[0838] In some embodiments, a subject is in the primary HIV infection or acute phase. In some embodiments, a subject is suffering from fever, lymph node enlargement, fatigue, rash, gastrointestinal symptoms, acute neuropathy, myalgias and/or malaise, or any other symptom of acute HIV infection. In some embodiments, a subject is in the primary stage of HIV infection and is asymptomatic.

[0839] In some embodiments, a subject is suffering from additional co-morbidities related or unrelated to HIV infection, including any of the following: cardiovascular disease, bone disease, renal and hepatic dysfunction. With the emergence of antiretroviral therapies and long term treatment of HIV, cancer has become an increasingly larger cause of mortality in HIV subjects (see Uldrick, Thomas S., et al. J. of Clinical Oncology, 35.33: 3774, 2017, which is herein incorporated by reference). In some embodiments, a subject is additionally suffering from and/or is susceptible to cancer. Exemplary cancers include AIDS-associated cancers such as aggressive B-cell lymphomas (i.e., diffuse large B-cell lymphoma, Burkitt's lymphoma, plasmablastic lymphoma, primary effusion lymphoma, and primary CNS lymphoma), Kaposi sarcoma, and cervical cancer, and non-AIDS-associated cancers, such as classic Hodgkin lymphoma, lung cancer, anal cancer, liver cancer, and head and neck cancers.

[0840] In some embodiments, a subject has not previously received an HIV therapy.

[0841] In some embodiments, a subject is under analytical treatment interruption (ATI).

[0842] In some embodiments, a subject suffering from an HIV infection may have received or is currently receiving other HIV therapy. In some embodiments, a subject is or has received antiretroviral therapy (ART). In some embodiments, a subject is currently receiving or has received one or more ART treatments listed in Table 1.

[0843] In some embodiments, a subject has been receiving ART for greater than 1 week, greater than 2 weeks, greater than 3 weeks, greater than 4 weeks, greater than 5 weeks, greater than 6 weeks, greater than 7 weeks, greater than 8 weeks, greater than 12 weeks, greater than 4 months, greater than 5 months, greater than 6 months, greater than 7 months, greater than 8 months, greater than 9 months, greater than 10 months, or greater than 1 year. In some embodiments, a subject is responsive to ART at the time a polyribonucleotide, composition or pharmaceutical composition described herein is administered. In some embodiments, a subject is not responsive to one or more ART agents at the time a polyribonucleotide, composition or pharmaceutical composition described herein is administered.

[0844] In some embodiments a subject received ART within less than 6 months of receiving an HIV diagnosis (e.g., less than 12 weeks of receiving an HIV diagnosis).

[0845] In some embodiments, a subject has previously received ART. In some embodiments, a subject received prior ART treatment for greater than 1 week, greater than 2 weeks, greater than 3 weeks, greater than 4 weeks, greater than 5 weeks, greater than 6 weeks, greater than 7 weeks, greater than 8 weeks, greater than 12 weeks, greater than 4 months, greater than 5 months, greater than 6 months, greater than 7 months, greater than 8 months, greater than 9 months, greater than 10 months, or greater than 1 year. In some embodiments, a subject was responsive to the prior ART treatment. In some embodiments, a subject was not responsive to the prior ART treatment.

[0846] In some embodiments, a subject with an HIV infection is clinically stable. In some embodiments, a subject is characterized by any one of the following characteristics: an absolute neutrophil count>1,000/mm³; hemoglobin levels>10.0 g/dL for men and >9.0 g/dL for women; platelet count>100,000/mm³; an estimated or a measured glomerular filtration rate>60 mL/min/1.73 m² as determined by the National Institutes of Health (NIH) Clinical Center laboratory; aspartate aminotransferase (AST) and alanine aminotransferase (ALT) levels of <2.5 times upper limit of normal (ULN); or direct bilirubin within the normal range for the NIH Clinical Center laboratory.

[0847] In some embodiments, a subject has a primary HIV infection. A primary HIV infection may be defined by one or more of the following: a detectable plasma HIV-1 RNA levels of >2000 copies/mL with a negative result from an HIV-1 enzyme immunoassays (EIA); a positive result from an HIV-1 EIA with a negative or indeterminate result from an HIV-1 western blot or another confirmatory antibody test that subsequently evolves to a confirmed positive result; a negative result from an HIV-1 EIA within the past 4 months and HIV-1 RNA levels of >400,000 copies/mL, in the setting of a potential exposure to HIV-1, or a negative result from an HIV-1 EIA within 6 months prior to a positive result from an HIV-1 EIA and an HIV-1 western blot or another confirmatory antibody test; presence of low level of HIV antibodies as determined by having a positive EIA or a positive Western blot with a non-reactive detuned EIA according to a serologic testing algorithm for recent infection.

[0848] In some embodiments, a subject is receiving continuous ART treatment and maintains a plasma HIV level that is undetectable or less than 400 copies/mL for greater than 1 month (e.g., greater than 1 month, greater than 2 months, greater than 3 months, greater than 4 months, greater than 6 months, greater than 1 year). In some embodiments, a subject has an HIV viral load (i.e., plasma viremia) of between about 200 and 5,000 copies/mL. In some embodiments, a subject has at least two documented viral levels in plasma of at least 200 copies/mL in the 12 months before treatment.

[0849] In some embodiments, a subject has received no ART in the last month. In some embodiments, a subject has received no ART in the last year. In some embodiments, a subject has received no ART in the last 2 years.

[0850] In some embodiments, a subject does not meet any one of the following criteria: chronic hepatitis B infection, as evidenced by a positive test for hepatitis B surface antigen (HBsAg), or chronic hepatitis C virus (HCV) infection, as evidenced by a positive test for HCV RNA; have had an HIV immunotherapy or vaccine(s) received within 1 year prior to treatment have received any licensed or experimental non-HIV vaccination (e.g., hepatitis B, influenza, pneumococcal polysaccharide) received within 2 weeks prior to treatment; have received other investigational study agent within 28 days of treatment; have an any active malignancy that may require systemic chemotherapy or radiation therapy; have received immunosuppressive medications within 3 months prior to enrollment (not including corticosteroid nasal spray or inhaler, topical corticosteroids for mild, uncomplicated dermatitis; or oral/parenteral corticosteroids administered for non-chronic conditions not expected to recur); have a history or other clinical evidence of: significant or unstable cardiac or cerebrovascular disease (e.g., angina, congestive heart failure, recent stroke or myocardial infarction); severe illness, malignancy, immunodeficiency other than HIV; or documented multiclass ART drug resistance.

### VII. Treatment Methods

[0851] In some embodiments, a pharmaceutical composition described herein can be taken up by cells for production of an encoded antibody agent at therapeutically relevant serum concentrations. Accordingly, the present disclosure provides methods of using pharmaceutical compositions described herein. For example, in some embodiments, a method provided herein comprises administering a pharmaceutical composition described herein to a subject.

[0852] As used herein, the term “administering” or “administration” typically refers to the administration of a composition to a subject to achieve delivery of an agent (e.g., at least one polyribonucleotide encoding an antibody agent described herein) that is, or is included in, a composition to a target site or a site to be treated. Those of ordinary skill in the art will be aware of a variety of routes that may, in appropriate circumstances, be utilized for administration to a subject, for example a human. Administration may be, for example, bronchial (e.g., by bronchial instillation), buccal, dermal (which may be or comprise, for example, one or more of topical to the dermis, intradermal, interdermal, transdermal, etc.), enteral, intra-arterial, intradermal, intragastric, intramedullary, intramuscular, intranasal, intraperitoneal, intrathecal, intravenous, intraventricular, within a specific organ (e.g., intrahepatic), mucosal, nasal, oral, rectal, subcutaneous, sublingual, topical, tracheal (e.g., by intratracheal instillation), vaginal, vitreal, etc. In preferred embodiments, administration may be intramuscular, intravenous, or subcutaneous.

[0853] In some embodiments, administration of a pharmaceutical composition results in delivery of one or more polyribonucleotides as described herein (e.g., encoding an immunoglobulin chain of an antibody agent) to a subject. In some embodiments, administering a pharmaceutical composition to a subject results in expression in the subject of an immunoglobulin chain of an antibody agent encoded by an administered polyribonucleotide. In some embodiments, administering a pharmaceutical composition to a subject results in expression in the subject of an antibody agent encoded by an administered polyribonucleotide.

[0854] In some embodiments, a therapeutically relevant concentration of an antibody agent or immunoglobulin chain thereof can be at least 1 μg/ml (e.g., at least 10 μg/ml) in the subject's serum or plasma.

[0855] In some embodiments, an antibody agent expressed following administration of a pharmaceutical composition described herein is characterized in that it exhibits a geometric mean IC50 of less than 1 μg/ml against at least five sensitive HIV-1 clones when tested in the TZM-bl cell pseudovirus neutralization assay. In some embodiments, an antibody agent expressed following administration of a pharmaceutical composition described herein is characterized in that it exhibits a geomean IC50 of less than 0.15 μg/mL against a global reference panel when tested in the TZM-bl cell pseudovirus neutralization assay. In some embodiments, an antibody agent expressed following administration of a pharmaceutical composition described herein is characterized in that it is capable of neutralizing one or more HIV strains when tested in the TZM-bl cell pseudovirus neutralization assay at antibody agent concentrations up to 25 μg/ml. In some embodiments, an antibody agent expressed following administration of a pharmaceutical composition described herein is characterized in that it is capable of neutralizing one or more HIV strains at a level that is within 3-fold of a level of an equivalent amount of recombinant benchmark antibody. In some embodiments, a recombinant benchmark antibody is an unmodified wild-type IgG antibody comprising the same HCDR1, HCDR2, HCDR2, LCDR1, LCDR2, and LCDR3 as the antibody agent.

[0856] In some embodiments, administration may involve only a single dose. In some embodiments, administration may involve application of a fixed number of doses.

[0857] In some embodiments, administration may involve dosing that is intermittent (e.g., a plurality of doses separated in time) and/or periodic (e.g., individual doses separated by a common period of time) dosing. In some embodiments, administration may involve continuous dosing (e.g., perfusion) for at least a selected period of time.

[0858] In some embodiments, a dosing regimen comprises a plurality of doses each of which is separated in time from other doses. In some embodiments, individual doses are separated from one another by a time period of the same length; in some embodiments, a dosing regimen comprises a plurality of doses and at least two different time periods separating individual doses. In some embodiments, all doses within a dosing regimen are of the same unit dose amount. In some embodiments, different doses within a dosing regimen are of different amounts. In some embodiments, a dosing regimen comprises a first dose in a first dose amount, followed by one or more additional doses in a second dose amount different from the first dose amount. In some embodiments, a dosing regimen comprises a first dose in a first dose amount, followed by one or more additional doses in a second dose amount same as the first dose amount. In some embodiments, a dosing regimen is correlated with a desired or beneficial outcome when administered across a relevant population (i.e., is a therapeutic dosing regimen).

[0859] Those skilled in the art are aware that immunotherapies (e.g., polyribonucleotides encoding antibody agents) can be administered in dosing cycles. In some embodiments, pharmaceutical compositions described herein are administered in one or more dosing cycles.

[0860] In some embodiments, one dosing cycle is at least 3 or more days (including, e.g., at least 4, at least 5, at least 6, at least 7, at least 8, at least 9, at least 10, at least 11, at least 12, at least 13, at least 14, at least 15, at least 16, at least 17, at least 18, at least 19, at least 20, at least 21, at least 22, at least 23, at least 24, at least 25, at least 26, at least 27, at least 28, at least 29, or at least 30 days. In some embodiments, one dosing cycle is at least 21 days.

[0861] In some embodiments, one dosing cycle may involve multiple doses, e.g., according to a pattern such as, for example, a dose may be administered daily within a dosing cycle, or a dose may be administered every 2 days, every 3 days, every 4 days, every 5 days, every 6 days, every 7 days, every 2 weeks, monthly, every 2 months within a cycle.

[0862] In some embodiments, multiple dosing cycles may be administered. For example, in some embodiments, at least 2 dosing cycles (including, e.g., at least 3 dosing cycles, at least 4 dosing cycles, at least 5 dosing cycles, at least 6 dosing cycles, at least 7 dosing cycles, at least 8 dosing cycles, at least 9 dosing cycles, at least 10 dosing cycles, or more) can be administered. In some embodiments, the number of dosing cycles to be administered may vary with types of treatment (e.g., monotherapy vs. combination therapy). In some embodiments, at least 3-8 dosing cycles may be administered.

[0863] In some embodiments, there may be a “rest period” between dosing cycles; in some embodiments, there may be no rest period between dosing cycles. In some embodiments, there may be sometimes a rest period and sometimes no rest period between dosing cycles.

[0864] In some embodiments, a rest period may have a length within a range of several days to several months. For example, in some embodiments, a rest period may have a length of at least 3 days or more, including, e.g., at least 4 days, at least 5 days, at least 6 days, at least 7 days, at least 8 days, at least 9 days, at least 10 days, at least 11 days, at least 12 days, at least 13 days, at least 14 days or more. In some embodiments, a rest period may have a length of at least 1 week or more, including, e.g., at least 2 weeks, at least 3 weeks, at least 4 weeks, or more.

[0865] Dosage of pharmaceutical compositions described herein may vary with a number of factors including, e.g., but not limited to body weight of a subject to be treated, cancer types and/or cancer stages, and/or monotherapy or combination therapy. In some embodiments, a dosing cycle involves administration of a set number and/or pattern of doses. For example, in some embodiments, a pharmaceutical composition described herein is administered at least one dose per dosing cycle, including, e.g., at least two doses per dosing cycle, at least three doses per dosing cycle, at least four doses per dosing cycle, or more.

[0866] In some embodiments, a dosing cycle involves administration of a set cumulative dose, e.g., over a particular period of time, and optionally via multiple doses, which may be administered, for example, at set interval(s) and/or according to a set pattern. In some embodiments, a set cumulative dose may be administered via multiple doses at set intervals such that there is at least some temporal overlap in biological and/or pharmacokinetics effects generated by such multiple doses on a target cell or on a subject being treated. In some embodiments, a set cumulative dose may be administered via multiple doses at set intervals such that biological and/or pharmacokinetics effects generated by such multiple doses on a target cell or on a subject being treated may be additive. By way of example only, in some embodiments, a set cumulative dose of X mg may be administered via two doses with each dose of X/2 mg, wherein such two doses are administered sufficiently close in time such that biological and/or pharmacokinetics effects generated by each X/2-mg dose on a target cell or on a subject being treated may be additive.

[0867] The present disclosure provides the recognition that the timing of administration of multiple doses of an antibody agent described herein, alone or in combination with another anti-HIV antibody can impact therapeutic efficacy. For example, without wishing to be bound to any particular theory, in the event a dose of a second RibobNAb is administered too long after a dose of a first RibobNAb is administered, a period of time exists when the treatment essentially involves a monotherapy, which could put the first RibobNAb in jeopardy of viral escape.

[0868] In some embodiments, dosing may be adjusted based on response of a subject receiving the therapy. For example, in some embodiments, dosing may involve administration of a higher dose followed later by administration of a lower dose if one or more parameters for safety pharmacology assessment indicates that the prior dose may not satisfy the medical safety requirement according to a physician. In some embodiments, dose escalation may be performed at one or more of the levels. Without wishing to be bound by any particular theory, the present disclosure, among other things, provides an insight that a pharmaceutically guided dose escalation (PGDE) method may be applied to determine an appropriate dose of pharmaceutical compositions described herein.

[0869] In some embodiments, pharmaceutical compositions described herein can be administered to subjects as monotherapy.

[0870] In some embodiments, a pharmaceutical composition provided herein may be administered as part of combination therapy. In some embodiments, a pharmaceutical composition provided herein may be administered as part of a combination therapy comprising the pharmaceutical composition and one or more anti-HIV antibody agents or one or more anti-HIV RibobNAbs. In some embodiments, one or more HIV antibody agents can each comprise CDRs from 1-18, PGT121, 3BNC117, b12, 10-1074, 10E8, 10E8v4, VRC01, VRC07-523-L/S, or PGDM1400. In some embodiments, one or more HIV RibobNAbs can each comprise CDRs from 1-18, PGT121, 3BNC117, b12, 10-1074, 10E8, 10E8v4, VRC01, VRC07-523-L/S, PGDM1400, or a combination thereof.

[0871] In some embodiments, a pharmaceutical composition provided herein may be administered as part of a combination therapy comprising the pharmaceutical composition and ART. In some embodiments, the ART may comprise one or more agents provided in Table 1.

[0872] In some embodiments, subjects receiving a composition provided herein (e.g., a pharmaceutical composition) may be monitored periodically over a dosing regimen to assess efficacy of the administered treatment. For example, in some embodiments, efficacy of an administered treatment may be assessed periodically, e.g., weekly, biweekly, every 4 weeks, every 5 weeks, every 6 weeks, every 7 weeks, every 8 weeks, or longer.

### VIII. Methods of Manufacture

[0873] Individual polyribonucleotides can be produced by methods known in the art. For example, in some embodiments, polyribonucleotides can be produced by in vitro transcription, for example, using a DNA template. A plasmid DNA used as a template for in vitro transcription to generate a polyribonucleotide described herein is also within the scope of the present disclosure.

[0874] A DNA template is used for in vitro RNA synthesis in the presence of an appropriate RNA polymerase (e.g., a recombinant RNA-polymerase such as a T7 RNA-polymerase) with ribonucleotide triphosphates (e.g., ATP, CTP, GTP, UTP). In some embodiments, polyribonucleotides (e.g., ones described herein) can be synthesized in the presence of modified ribonucleotide triphosphates. By way of example only, in some embodiments, pseudouridine (ψ), N1-methyl-pseudouridine (m1ψ), or 5-methyl-uridine (m5U) can be used to replace uridine triphosphate (UTP). In some embodiments, pseudouridine (ψ) can be used to replace uridine triphosphate (UTP). In some embodiments, N1-methyl-pseudouridine (m1ψ) can be used to replace uridine triphosphate (UTP). In some embodiments, 5-methyl-uridine (m5U) can be used to replace uridine triphosphate (UTP).

[0875] As will be clear to those skilled in the art, during in vitro transcription, an RNA polymerase (e.g., as described and/or utilized herein) typically traverses at least a portion of a single-stranded DNA template in the 3′→5′ direction to produce a single-stranded complementary RNA in the 5′→3′ direction.

[0876] In some embodiments where a polyribonucleotide comprises a polyA tail, one of those skill in the art will appreciate that such a polyA tail may be encoded in a DNA template, e.g., by using an appropriately tailed PCR primer, or it can be added to a polyribonucleotide after in vitro transcription, e.g., by enzymatic treatment (e.g., using a poly(A) polymerase such as an E. coli Poly(A) polymerase). Suitable poly(A) tails are described herein above. For example, in some embodiments, a poly(A) tail comprises a nucleotide sequence according to SEQ ID NO: 1461. In some embodiments, a poly(A) tail comprises a plurality of A residues interrupted by a linker. In some embodiments, a linker comprises the nucleotide sequence GCATATGAC (SEQ ID NO: 1461).

[0877] In some embodiments, those skilled in the art will appreciate that addition of a 5′ cap to an RNA (e.g., mRNA) can facilitate recognition and attachment of the RNA to a ribosome to initiate translation and enhances translation efficiency. Those skilled in the art will also appreciate that a 5′ cap can also protect an RNA product from 5′ exonuclease mediated degradation and thus increases half-life. Methods for capping are known in the art; one of ordinary skill in the art will appreciate that in some embodiments, capping may be performed after in vitro transcription in the presence of a capping system (e.g., an enzyme-based capping system such as, e.g., capping enzymes of vaccinia virus). In some embodiments, a cap may be introduced during in vitro transcription, along with a plurality of ribonucleotide triphosphates such that a cap is incorporated into a polyribonucleotide during transcription (also known as co-transcriptional capping). In some embodiments, a GTP fed-batch procedure with multiple additions in the course of the reaction may be used to maintain a low concentration of GTP in order to effectively cap the RNA. Suitable 5′ cap are described herein above. For example, in some embodiments, a 5′ cap comprises m7(3′OMeG)(5′)ppp(5′)(2′OMeA)pG.

[0878] Following RNA transcription, a DNA template is digested. In some embodiments, digestion can be achieved with the use of DNase I under appropriate conditions.

[0879] In some embodiments, in-vitro transcribed polyribonucleotides may be provided in a buffered solution, for example, in a buffer such as HEPES, a phosphate buffer solution, a citrate buffer solution, an acetate buffer solution; in some embodiments, such solution may be buffered to a pH within a range of, for example, about 6.5 to about 7.5; in some embodiments approximately 7.0. In some embodiments, production of polyribonucleotides may further include one or more of the following steps: purification, mixing, filtration, and/or filling.

[0880] In some embodiments, polyribonucleotides can be purified (e.g., in some embodiments after in vitro transcription reaction), for example, to remove components utilized or formed in the course of the production, like, e.g., proteins, DNA fragments, and/or or nucleotides. Various nucleic acid purifications that are known in the art can be used in accordance with the present disclosure. Certain purification steps may be or include, for example, one or more of precipitation, column chromatography (including, e.g., but not limited to anionic, cationic, hydrophobic interaction chromatography (HIC)), solid substrate-based purification (e.g., magnetic bead-based purification). In some embodiments, polyribonucleotides may be purified using magnetic bead-based purification, which in some embodiments may be or comprise magnetic bead-based chromatography. In some embodiments, polyribonucleotides may be purified using hydrophobic interaction chromatography (HIC) and/or diafiltration. In some embodiments, polyribonucleotides may be purified using HIC followed by diafiltration.

[0881] In some embodiments, dsRNA may be obtained as side product during in vitro transcription. In some such embodiments, a second purification step may be performed to remove dsRNA contamination. For example, in some embodiments, cellulose materials (e.g., microcrystalline cellulose) may be used to remove dsRNA contamination, for examples in some embodiments in a chromatographic format. In some embodiments, cellulose materials (e.g., microcrystalline cellulose) can be pretreated to inactivate potential RNase contamination, for example in some embodiments by autoclaving followed by incubation with aqueous basic solution, e.g., NaOH. In some embodiments, cellulose materials may be used to purify polyribonucleotides according to methods described in WO 2017/182524, the entire content of which is incorporated herein by reference.

[0882] In some embodiments, a batch of polyribonucleotides may be further processed by one or more steps of filtration and/or concentration. For example, in some embodiments, polyribonucleotide(s), for example, after removal of dsRNA contamination, may be further subject to diafiltration (e.g., in some embodiments by tangential flow filtration), for example, to adjust the concentration of polyribonucleotides to a desirable RNA concentration and/or to exchange buffer to a drug substance buffer.

[0883] In some embodiments where an antibody agent is encoded by a first polyribonucleotide encoding a first immunoglobulin chain and a second polyribonucleotide encoding a second immunoglobulin chain such that both, when both translated and expressed, form a full antibody agent, a batch of a first polyribonucleotides and a batch of a second polyribonucleotides, each after purification (e.g., as described herein) can be mixed in an appropriate ratio. For example, in some embodiments, such a first polyribonucleotide batch and a second polyribonucleotide batch may be mixed in a molar ratio of about 1:1.5 to about 1.5:1, e.g., in some embodiments in molar ratio of about 1:1.

[0884] In some embodiments, polyribonucleotides may be processed through 0.2 μm filtration before they are filled into appropriate containers.

[0885] In some embodiments, polyribonucleotides and compositions thereof may be manufactured in accordance with a process as described herein, or as otherwise known in the art.

[0886] In some embodiments, polyribonucleotides and compositions thereof may be manufactured at a large scale. For example, in some embodiments, a batch of polyribonucleotides can be manufactured at a scale of greater than 1 g, greater than 2 g, greater than 3 g, greater than 4 g, greater than 5 g, greater than 6 g, greater than 7 g, greater than 8 g, greater than 9 g, greater than 10 g, greater than 15 g, greater than 20 g, or higher.

[0887] In some embodiments, RNA quality control may be performed and/or monitored at any time during production process of polyribonucleotides and/or compositions comprising the same. For example, in some embodiments, RNA quality control parameters, including one or more of RNA identity (e.g., sequence, length, and/or RNA natures), RNA integrity, RNA concentration, residual DNA template, and residual dsRNA, may be assessed and/or monitored after each or certain steps of a polyribonucleotide manufacturing process, e.g., after in vitro transcription, and/or each purification step.

[0888] In some embodiments, the stability of polyribonucleotides (e.g., produced by in vitro transcription) and/or compositions comprising two or more RNAs (e.g., one encoding a HC of an antibody and another encoding a LC of the antibody) can be assessed under various test storage conditions, for example, at room temperatures vs. fridge or sub-zero temperatures over a period of time (e.g., at least 3 months, at least 6 months, at least 9 months, at least 12 months, or longer). In some embodiments, polyribonucleotides (e.g., ones described herein) and/or compositions thereof may be stored stable at a fridge temperature (e.g., about 4° C. to about 10° C.) for at least 1 month or longer including, at least 2 months, at least 3 months, at least 4 months, at least 5 months, at least 6 months, at least 7 months, at least 8 months, at least 9 months, at least 10 months, at least 11 months, or at least 12 months or longer. In some embodiments, polyribonucleotides (e.g., ones described herein) and/or compositions thereof may be stored stable at a sub-zero temperature (e.g., −20° C. or below) for at least 1 month or longer including, at least 2 months, at least 3 months, at least 4 months, at least 5 months, at least 6 months, at least 7 months, at least 8 months, at least 9 months, at least 10 months, at least 11 months, or at least 12 months or longer. In some embodiments, polyribonucleotides (e.g., ones described herein) and/or compositions thereof may be stored stable at room temperature (e.g., at about 25° C.) for at least 1 month or longer.

[0889] In some embodiments, one or more assessments may be utilized during manufacture, or other preparation or use of polyribonucleotides (e.g., as a release test).

[0890] In some embodiments, one or more quality control parameters may be assessed to determine whether polyribonucleotides described herein meet or exceed acceptance criteria (e.g., for subsequent formulation and/or release for distribution). In some embodiments, such quality control parameters may include, but are not limited to RNA integrity, RNA concentration, residual DNA template and/or residual dsRNA. Certain methods for assessing RNA quality are known in the art; for example, one of skill in the art will recognize that in some embodiments, one or more analytical tests can be used for RNA quality assessment. Examples of such certain analytical tests may include but are not limited to gel electrophoresis, UV absorption, and/or PCR assay.

[0891] In some embodiments, a batch of polyribonucleotides may be assessed for one or more features as described herein to determine next action step(s). For example, a batch of polyribonucleotides can be designated for one or more further steps of manufacturing and/or formulation and/or distribution if RNA quality assessment indicates that such a batch of polyribonucleotides meet or exceed the relevant acceptance criteria. Otherwise, an alternative action can be taken (e.g., discarding the batch) if such a batch of polyribonucleotides does not meet or exceed the acceptance criteria.

[0892] In some embodiments, a batch of polyribonucleotides that satisfy assessment results can be utilized for one or more further steps of manufacturing and/or formulation and/or distribution.

### IX. DNA Constructs

[0893] Among other things, the present disclosure provides DNA constructs, for example that may encode one or more antibody agents as described herein, or components thereof. In some embodiments, DNA constructs provided by and/or utilized in accordance with the present disclosure are comprised in a vector.

[0894] Non-limiting examples of a vector include plasmid vectors, cosmid vectors, phage vectors such as lambda phage, viral vectors such as retroviral, adenoviral or baculoviral vectors, or artificial chromosome vectors such as bacterial artificial chromosomes (BAC), yeast artificial chromosomes (YAC), or P1 artificial chromosomes (PAC). In some embodiments, a vector is an expression vector. In some embodiments, a vector is a cloning vector. In general, a vector is a nucleic acid construct that can receive or otherwise become linked to a nucleic acid element of interest (e.g., a construct that is or encodes a payload, or that imparts a particular functionality, etc.).

[0895] Expression vectors, which may be plasmid or viral or other vectors, typically include an expressible sequence of interest (e.g., a coding sequence) that is functionally linked with one or more control elements (e.g., promoters, enhancers, transcription terminators, etc.). Typically, such control elements are selected for expression in a system of interest. In some embodiments, a system is ex vivo (e.g., an in vitro transcription system); in some embodiments, a system is in vivo (e.g., a bacterial, yeast, plant, insect, fish, vertebrate, mammalian cell or tissue, etc.).

[0896] Cloning vectors are generally used to modify, engineer, and/or duplicate (e.g., by replication in vivo, for example in a simple system such as bacteria or yeast, or in vitro, such as by amplification such as polymerase chain reaction or other amplification process). In some embodiments, a cloning vector may lack expression signals.

[0897] In many embodiments, a vector may include replication elements such as primer binding site(s) and/or origin(s) of replication. In many embodiments, a vector may include insertion or modification sites such as restriction endonuclease recognition sites and/or guide RNA binding sites, etc.

[0898] In some embodiments, a vector is a viral vector (e.g., an AAV vector). In some embodiments, a vector is a non-viral vector. In some embodiments, a vector is a plasmid.

[0899] Those skilled in the art are aware of a variety of technologies useful for the production of recombinant polynucleotides (e.g., DNA or RNA) as described herein. For example, restriction digestion, reverse transcription, amplification (e.g., by polymerase chain reaction), Gibson assembly, etc., are well established and useful tools and technologies. Alternatively or additionally, certain nucleic acids may be prepared or assembled by chemical and/or enzymatic synthesis. In some embodiments, a combination of known methods is utilized to prepare a recombinant polynucleotide.

[0900] In some embodiments, polynucleotide(s) of the present disclosure are included in a DNA construct (e.g., a vector) amenable to transcription and/or translation.

[0901] In some embodiments, an expression vector comprises a polynucleotide that encodes proteins and/or polypeptides of the present disclosure operatively linked to a sequence or sequences that control expression (e.g., promoters, start signals, stop signals, polyadenylation signals, activators, repressors, etc.). In some embodiments, a sequence or sequences that control expression are selected to achieve a desired level of expression. In some embodiments, more than one sequence that controls expression (e.g., promoters) are utilized. In some embodiments, more than one sequence that controls expression (e.g., promoters) are utilized to achieve a desired level of expression of a plurality of polynucleotides that encode a plurality proteins and/or polypeptides. In some embodiments, a plurality of recombinant proteins and/or polypeptides are expressed from the same vector (e.g., a bi-cistronic vector, a tri-cistronic vector, multi-cistronic). In some embodiments, a plurality of polypeptides are expressed, each of which is expressed from a separate vector.

[0902] In some embodiments, an expression vector comprising a polynucleotide of the present disclosure is used to produce a RNA and/or protein and/or polypeptide in a host cell. In some embodiments, a host cell may be in vitro (e.g., a cell line)—for example a cell or cell line (e.g., Human Embryonic Kidney (HEK cells), Chinese Hamster Ovary cells, etc.) suitable for producing polynucleotides of the present disclosure and proteins and/or polypeptides encoded by said polynucleotides.

[0903] In some embodiments, an expression vector is an RNA expression vector. In some embodiments, an RNA expression vector comprises a polynucleotide template used to produce an RNA in cell-free enzymatic mix. In some embodiments, an RNA expression vector comprising a polynucleotide template is enzymatically linearized prior to in vitro transcription. In some embodiments, a polynucleotide template is generated through PCR as a linear polynucleotide template. In some embodiments, a linearized polynucleotide is mixed with enzymes suitable for RNA synthesis, RNA capping and/or purification. In some embodiments, the resulting RNA is suitable for producing proteins encoded by the RNA.

[0904] A variety of methods are known in the art to introduce an expression vector into host cells. In some embodiments, a vector may be introduced into host cells using transfection. In some embodiments, transfection is completed, for example, using calcium phosphate transfection, lipofection, or polyethylenimine-mediated transfection. In some embodiments, a vector may be introduced into a host cell using transduction.

[0905] In some embodiments, transformed host cells are cultured following introduction of a vector into a host cell to allow for expression of said recombinant polynucleotides. In some embodiments, a transformed host cells are cultured for at least 12 hours, 16 hours, 20 hours, 24 hours, 28 hours, 32 hours, 36 hours 40 hours, 44 hours, 48 hours, 52 hours, 56 hours, 60 hours, 64 hours, 68 hours, 72 hours or longer. Transformed host cells are cultured in growth conditions (e.g., temperature, carbon-dioxide levels, growth medium) in accordance with the requirements of a host cell selected. A skilled artisan would recognize culture conditions for host cells selected are well known in the art.

### EXEMPLARY NUMBERED EMBODIMENTS

[0906] Embodiment 1. A polyribonucleotide encoding an immunoglobulin chain of an antibody agent, wherein the immunoglobulin chain comprises a heavy chain variable (VH) domain, and the VH domain comprises: (a) a heavy chain complementarity determining region (HCDR)1 comprising an amino acid sequence according to SEQ ID NO: 18; (b) an HCDR2 comprising an amino acid sequence according to SEQ ID NO: 21; and (c) an HCDR3 comprising an amino acid sequence according to SEQ ID NO: 24.
[0907] Embodiment 2. The polyribonucleotide of embodiment 1, wherein the polyribonucleotide comprises a VH domain-encoding sequence, and wherein the VH domain-encoding sequence comprises: (a) the HCDR1-encoding sequence that comprises or consists of the ribonucleic acid sequence according to SEQ ID NO: 19; (b) the HCDR2-encoding sequence that comprises or consists of the ribonucleic acid sequence according to SEQ ID NO: 22; and (c) the HCDR3-encoding sequence that comprises or consists of the ribonucleic acid sequence according to SEQ ID NO: 25.
[0908] Embodiment 3. The polyribonucleotide of embodiment 1 or 2, wherein the VH domain comprises or consists of an amino acid sequence according to SEQ ID NO: 36.
[0909] Embodiment 4. The polyribonucleotide of any one of embodiments 1-3, wherein the VH domain-encoding sequence comprises or consists of a ribonucleic acid sequence according to SEQ ID NO: 37.
[0910] Embodiment 5. The polyribonucleotide of any one of embodiments 1-3, wherein the VH domain-encoding sequence comprises or consists of a ribonucleic acid sequence according to SEQ ID NO: 39 or SEQ ID NO: 41.
[0911] Embodiment 6. The polyribonucleotide of any one of embodiments 1-5, wherein the immunoglobulin chain further comprises one or more constant domains, and wherein the VH domain is operably linked to the one or more constant domains.
[0912] Embodiment 7. The polyribonucleotide of embodiment 6, wherein the one or more constant domains comprise a CH₂ domain.
[0913] Embodiment 8. The polyribonucleotide of embodiment 7, wherein the CH₂ domain comprises or consists of an amino acid sequence according to SEQ ID NO: 96.
[0914] Embodiment 9. The polyribonucleotide of embodiment 7 or 8, wherein the polyribonucleotide comprises a ribonucleic acid sequence that encodes the CH₂ domain and comprises or consists of a sequence according to SEQ ID NO: 97.
[0915] Embodiment 10. The polyribonucleotide of embodiment 7, wherein the CH₂ domain comprises one or more substitution mutations, wherein the one or more substitution mutations comprise or consist of G236A, A330L, I332E, or a combination thereof, and wherein the substitution mutation positions are according to EU numbering.
[0916] Embodiment 11. The polyribonucleotide of embodiment 7 or 10, wherein the CH₂ domain comprises one or more substitution mutations, wherein the one or more substitution mutations comprise or consist of G236A, and wherein the substitution mutation positions are according to EU numbering.
[0917] Embodiment 12. The polyribonucleotide of embodiment 7 or 10, wherein the CH₂ domain comprises one or more substitution mutations, wherein the one or more substitution mutations comprise or consist of I332E, and wherein the substitution mutation positions are according to EU numbering.
[0918] Embodiment 13. The polyribonucleotide of embodiment 7 or 10, wherein the CH₂ domain comprises one or more substitution mutations, wherein the one or more substitution mutations comprise or consist of G236A and I332E, and wherein the substitution mutation positions are according to EU numbering.
[0919] Embodiment 14. The polyribonucleotide of embodiment 7 or 10, wherein the CH₂ domain comprises one or more substitution mutations, wherein the one or more substitution mutations comprise or consist of G236A, A330L, and I332E, and wherein the substitution mutation positions are according to EU numbering.
[0920] Embodiment 15. The polyribonucleotide of any one of embodiments 7, 10, and 14, wherein the CH₂ domain comprises or consists of an amino acid sequence according to SEQ ID NO: 99.
[0921] Embodiment 16. The polyribonucleotide of any one of embodiments 7, 10, 14, and 15, wherein the polyribonucleotide comprises a ribonucleic acid sequence that encodes the CH₂ domain and comprises or consists of a sequence according to SEQ ID NO: 100.
[0922] Embodiment 17. The polyribonucleotide of any one of embodiments 7, 10, and 13, wherein the CH₂ domain comprises or consists of an amino acid sequence according to SEQ ID NO: 104.
[0923] Embodiment 18. The polyribonucleotide of any one of embodiments 7, 10, 13, and 17, wherein the polyribonucleotide comprises a ribonucleic acid sequence that encodes the CH₂ domain and comprises or consists of a sequence according to SEQ ID NO: 105.
[0924] Embodiment 19. The polyribonucleotide of any one of embodiments 7, 10, and 11, wherein the CH₂ domain comprises or consists of an amino acid sequence according to SEQ ID NO: 107.
[0925] Embodiment 20. The polyribonucleotide of any one of embodiments 7, 10, 11, and 19, wherein the polyribonucleotide comprises a ribonucleic acid sequence that encodes the CH₂ domain and comprises or consists of a sequence according to SEQ ID NO: 108.
[0926] Embodiment 21. The polyribonucleotide of any one of embodiments 7, 10, and 12, wherein the CH₂ domain comprises or consists of an amino acid sequence according to SEQ ID NO: 110.
[0927] Embodiment 22. The polyribonucleotide of any one of embodiments 7, 10, 12, and 21, wherein the polyribonucleotide comprises a ribonucleic acid sequence that encodes the CH₂ domain and comprises or consists of a sequence according to SEQ ID NO: 111.
[0928] Embodiment 23. The polyribonucleotide of any one of embodiments 6-22, wherein the one or more constant domains comprise a CH₃ domain.
[0929] Embodiment 24. The polyribonucleotide of embodiment 23, wherein the CH₃ domain comprises or consists of an amino acid sequence according to SEQ ID NO: 113.
[0930] Embodiment 25. The polyribonucleotide of embodiment 23 or 24, wherein the polyribonucleotide comprises a ribonucleic acid sequence that encodes the CH₃ domain and comprises or consists of a sequence according to SEQ ID NO: 114.
[0931] Embodiment 26. The polyribonucleotide of embodiment 23, wherein the CH₃ domain comprises or consists of an amino acid sequence according to SEQ ID NO: 116.
[0932] Embodiment 27. The polyribonucleotide of embodiment 23 or 26, wherein the polyribonucleotide comprises a ribonucleic acid sequence that encodes the CH₃ domain and comprises or consists of a sequence according to SEQ ID NO: 117.
[0933] Embodiment 28. The polyribonucleotide of embodiment 23, wherein the CH₃ domain comprises one or more substitution mutations, wherein the one or more substitution mutations comprise or consist of M428L, N434S, or a combination thereof, and wherein the substitution mutation positions are according to EU numbering.
[0934] Embodiment 29. The polyribonucleotide of embodiment 23 or 28, wherein the CH₃ domain comprises or consists of an amino acid sequence according to SEQ ID NO: 116.
[0935] Embodiment 30. The polyribonucleotide of any one of embodiments 23, 28, and 29, wherein the polyribonucleotide comprises a ribonucleic acid sequence that encodes the CH₃ domain and comprises or consists of a sequence according to SEQ ID NO: 117.
[0936] Embodiment 31. The polyribonucleotide of embodiment 23 or 28, wherein the CH₃ domain comprises or consists of an amino acid sequence according to SEQ ID NO: 134.
[0937] Embodiment 32. The polyribonucleotide of any one of embodiments 23, 28, and 31, wherein the polyribonucleotide comprises a ribonucleic acid sequence that encodes the CH₃ domain and comprises or consists of a sequence according to SEQ ID NO: 135.
[0938] Embodiment 33. The polyribonucleotide of embodiment 23, wherein the CH₃ domain comprises one or more substitution mutations, wherein the one or more substitution mutations comprise or consist of Y349C, T366S, L368A, Y407V, or a combination thereof, and wherein the substitution mutation positions are according to EU numbering.
[0939] Embodiment 34. The polyribonucleotide of embodiment 23, wherein the CH₃ domain comprises one or more substitution mutations, wherein the one or more substitution mutations comprise or consist of Y349C, T366S, L368A, Y407V, M428L, N434S, or a combination thereof, and wherein the substitution mutation positions are according to EU numbering.
[0940] Embodiment 35. The polyribonucleotide of embodiment 23, wherein the CH₃ domain comprises one or more substitution mutations, wherein the one or more substitution mutations further comprise or consist of Y349C, T366S, L368A, Y407V, M428L, and N434S, and wherein the substitution mutation positions are according to EU numbering.
[0941] Embodiment 36. The polyribonucleotide of any one of embodiments 28 and 33-35, wherein the CH₃ domain comprises or consists of an amino acid sequence according to SEQ ID NO: 122.
[0942] Embodiment 37. The polyribonucleotide of any one of embodiments 28 and 33-36, wherein the polyribonucleotide comprises a ribonucleic acid sequence that encodes the CH₃ domain and comprises or consists of a sequence according to SEQ ID NO: 123.
[0943] Embodiment 38. The polyribonucleotide of any one of embodiments 28 and 33-35, wherein the CH₃ domain comprises or consists of an amino acid sequence according to SEQ ID NO: 140.
[0944] Embodiment 39. The polyribonucleotide of any one of embodiments 28, 33-35, and 38, wherein the polyribonucleotide comprises a ribonucleic acid sequence that encodes the CH₃ domain and comprises or consists of a sequence according to SEQ ID NO: 141.
[0945] Embodiment 40. The polyribonucleotide of embodiment 23, wherein the CH₃ domain comprises one or more substitution mutations, wherein the one or more substitution mutations comprise or consist of S354C, T366W, or a combination thereof, and wherein the substitution mutation positions are according to EU numbering.
[0946] Embodiment 41. The polyribonucleotide of embodiment 23, wherein the CH₃ domain comprises one or more substitution mutations, wherein the one or more substitution mutations comprise S354C, T366W, M428L, N434S, or a combination thereof, and wherein the substitution mutation positions are according to EU numbering.
[0947] Embodiment 42. The polyribonucleotide of embodiment 23, wherein the CH₃ domain comprises one or more substitution mutations, wherein the one or more substitution mutations further comprise S354C, T366W, M428L, and N434S, and wherein the substitution mutation positions are according to EU numbering.
[0948] Embodiment 43. The polyribonucleotide of any one of embodiments 28 and 40-42, wherein the CH₃ domain comprises or consists of an amino acid sequence according to SEQ ID NO: 128.
[0949] Embodiment 44. The polyribonucleotide of any one of embodiments 28 and 40-43, wherein the polyribonucleotide comprises a ribonucleic acid sequence that encodes the CH₃ domain and comprises or consists of a sequence according to SEQ ID NO: 129.
[0950] Embodiment 45. The polyribonucleotide of any one of embodiments 28 and 40-42, wherein the CH₃ domain comprises or consists of an amino acid sequence according to SEQ ID NO: 146.
[0951] Embodiment 46. The polyribonucleotide of any one of embodiments 28, 40-42, and 45, wherein the polyribonucleotide comprises a ribonucleic acid sequence that encodes the CH₃ domain and comprises or consists of a sequence according to SEQ ID NO: 147.
[0952] Embodiment 47. The polyribonucleotide of any one of embodiments 6-46, wherein the one or more constant domains comprise a hinge domain.
[0953] Embodiment 48. The polyribonucleotide of embodiment 47, wherein the hinge domain comprises or consists of an amino acid sequence according to SEQ ID NO: 161.
[0954] Embodiment 49. The polyribonucleotide of embodiment 47 or 48, wherein the polyribonucleotide comprises a ribonucleic acid sequence that encodes the hinge domain and comprises or consists of a sequence according to SEQ ID NO: 162.
[0955] Embodiment 50. The polyribonucleotide of embodiment 47, wherein the hinge domain comprises or consists of an amino acid sequence according to SEQ ID NO: 164.
[0956] Embodiment 51. The polyribonucleotide of embodiment 47 or 50, wherein the polyribonucleotide comprises a ribonucleic acid sequence that encodes the hinge domain and comprises or consists of a sequence according to SEQ ID NO: 165.
[0957] Embodiment 52. The polyribonucleotide of embodiment 47, wherein the hinge domain comprises or consists of an amino acid sequence according to SEQ ID NO: 167.
[0958] Embodiment 53. The polyribonucleotide of embodiment 47 or 52, wherein the polyribonucleotide comprises a ribonucleic acid sequence that encodes the hinge domain and comprises or consists of a sequence according to SEQ ID NO: 168.
[0959] Embodiment 54. The polyribonucleotide of any one of embodiments 6-53, wherein the one or more constant domains comprise a CH₁ domain.
[0960] Embodiment 55. The polyribonucleotide of embodiment 54, wherein one or more constant domains comprise, in order, the CH₁ domain, the hinge domain, the CH₂ domain, and the CH₃ domain.
[0961] Embodiment 56. The polyribonucleotide of embodiment 54 or 55, wherein the CH₁ domain comprises or consists of an amino acid sequence according to SEQ ID NO: 76.
[0962] Embodiment 57. The polyribonucleotide of any one of embodiments 54-56, wherein the polyribonucleotide comprises a ribonucleic acid sequence that encodes the CH₁ domain and comprises or consists of a sequence according to SEQ ID NO: 77.
[0963] Embodiment 58. The polyribonucleotide of embodiment 54 or 55, wherein the CH₁ domain comprises or consists of an amino acid sequence according to SEQ ID NO: 81.
[0964] Embodiment 59. The polyribonucleotide of any one of embodiments 54-56, wherein the polyribonucleotide comprises a ribonucleic acid sequence that encodes the CH₁ domain and comprises or consists of a sequence according to SEQ ID NO: 82.
[0965] Embodiment 60. The polyribonucleotide of embodiment 54 or 55, wherein the CH₁ domain comprises one or more substitution mutations, wherein the one or more substitution mutations comprise or consist of K147E, K213D, or a combination thereof, and wherein the substitution mutation positions are according to EU numbering.
[0966] Embodiment 61. The polyribonucleotide of any one of embodiments 54, 55, and 60, wherein the CH₁ domain comprises or consists of an amino acid sequence according to SEQ ID NO: 84.
[0967] Embodiment 62. The polyribonucleotide of any one of embodiments 54, 55, 60, and 61, wherein the polyribonucleotide comprises a ribonucleic acid sequence that encodes the CH₁ domain and comprises or consists of a sequence according to SEQ ID NO: 85.
[0968] Embodiment 63. The polyribonucleotide of embodiment 54 or 55, wherein the immunoglobulin chain comprises or consists of an amino acid sequence according to SEQ ID NO: 1307.
[0969] Embodiment 64. The polyribonucleotide of any one of embodiments 54, 55, and 63, wherein the polyribonucleotide comprises or consists of a ribonucleic acid sequence according to SEQ ID NO: 1306.
[0970] Embodiment 65. The polyribonucleotide of embodiment 54 or 55, wherein the immunoglobulin chain comprises or consists of an amino acid sequence according to SEQ ID NO: 1310.
[0971] Embodiment 66. The polyribonucleotide of any one of embodiments 54, 55, and 65, wherein the polyribonucleotide comprises or consists of a ribonucleic acid sequence according to SEQ ID NO: 1309.
[0972] Embodiment 67. The polyribonucleotide of embodiment 54 or 55, wherein the immunoglobulin chain comprises or consists of an amino acid sequence according to SEQ ID NO: 1316.
[0973] Embodiment 68. The polyribonucleotide of any one of embodiments 54, 55, and 67, wherein the polyribonucleotide comprises or consists of a ribonucleic acid sequence according to SEQ ID NO: 1315.
[0974] Embodiment 69. The polyribonucleotide of embodiment 54 or 55, wherein the immunoglobulin chain comprises or consists of an amino acid sequence according to SEQ ID NO: 1325.
[0975] Embodiment 70. The polyribonucleotide of any one of embodiments 54, 55, and 69, wherein the polyribonucleotide comprises or consists of a ribonucleic acid sequence according to SEQ ID NO: 1324.
[0976] Embodiment 71. The polyribonucleotide of any one of embodiments 6-53, wherein the one or more constant domains comprise a light chain constant (CL) domain.
[0977] Embodiment 72. The polyribonucleotide of embodiment 71, wherein one or more constant domains comprise, in order, the CL domain, the hinge domain, the CH₂ domain, and the CH₃ domain.
[0978] Embodiment 73. The polyribonucleotide of embodiment 71 or 72, wherein the CL domain is a kappa constant domain.
[0979] Embodiment 74. The polyribonucleotide of any one of embodiments 71-73, wherein the CL domain comprises or consists of an amino acid sequence according to SEQ ID NO: 149.
[0980] Embodiment 75. The polyribonucleotide of any one of embodiments 71-74, wherein the polyribonucleotide comprises a ribonucleic acid sequence that encodes the light chain constant domain and comprises or consists of a sequence according to SEQ ID NO: 150.
[0981] Embodiment 76. The polyribonucleotide of any one of embodiments 71-73, wherein the CL domain comprises one or more substitution mutations, wherein the one or more substitution mutations comprise or consist of Q124E, and wherein the substitution mutation positions are according to EU numbering.
[0982] Embodiment 77. The polyribonucleotide of any one of embodiments 71-73, wherein the CL domain comprises one or more substitution mutations, wherein the one or more substitution mutations comprise or consist of R108A, T109S, or a combination thereof, and wherein the substitution mutation positions are according to EU numbering.
[0983] Embodiment 78. The polyribonucleotide of any one of embodiments 71-73, wherein the CL domain comprises one or more substitution mutations, wherein the one or more substitution mutations comprise or consist of R108A, T109S, Q124E or a combination thereof, and wherein the substitution mutation positions are according to EU numbering.
[0984] Embodiment 79. The polyribonucleotide of any one of embodiments 71-73 and 76, wherein the CL domain comprises or consists of an amino acid sequence according to SEQ ID NO: 152.
[0985] Embodiment 80. The polyribonucleotide of any one of embodiments 71-73, 76 and 79, wherein the polyribonucleotide comprises a ribonucleic acid sequence that encodes the light chain constant domain and comprises or consists of a sequence according to SEQ ID NO: 153.
[0986] Embodiment 81. The polyribonucleotide of embodiment 71 or 72, wherein the immunoglobulin chain comprises or consists of an amino acid sequence according to SEQ ID NO: 1319.
[0987] Embodiment 82. The polyribonucleotide of any one of embodiments 71, 72, and 81, wherein the polyribonucleotide comprises or consists of a ribonucleic acid sequence according to SEQ ID NO: 1318.
[0988] Embodiment 83. The polyribonucleotide of embodiment 71 or 72, wherein the immunoglobulin chain comprises or consists of an amino acid sequence according to SEQ ID NO: 1331.
[0989] Embodiment 84. The polyribonucleotide of any one of embodiments 71, 72, and 83, wherein the polyribonucleotide comprises or consists of a ribonucleic acid sequence according to SEQ ID NO: 1330.
[0990] Embodiment 85. The polyribonucleotide of embodiment 71 or 72, wherein the immunoglobulin chain comprises or consists of an amino acid sequence according to SEQ ID NO: 1334.
[0991] Embodiment 86. The polyribonucleotide of any one of embodiments 71, 72, and 85, wherein the polyribonucleotide comprises or consists of a ribonucleic acid sequence according to SEQ ID NO: 1333.
[0992] Embodiment 87. The polyribonucleotide of embodiment 71 or 72, wherein the immunoglobulin chain comprises or consists of an amino acid sequence according to SEQ ID NO: 1337.
[0993] Embodiment 88. The polyribonucleotide of any one of embodiments 71, 72, and 87, wherein the polyribonucleotide comprises or consists of a ribonucleic acid sequence according to SEQ ID NO: 1336.
[0994] Embodiment 89. The polyribonucleotide of embodiment 71 or 72, wherein the immunoglobulin chain comprises or consists of an amino acid sequence according to SEQ ID NO: 1340.
[0995] Embodiment 90. The polyribonucleotide of any one of embodiments 71, 72, and 89, wherein the polyribonucleotide comprises or consists of a ribonucleic acid sequence according to SEQ ID NO: 1339.
[0996] Embodiment 91. A polyribonucleotide encoding an immunoglobulin chain of an antibody agent, wherein the immunoglobulin chain comprises a light chain variable (VL) domain, and the VL domain comprises:
[0997] (a) a light chain complementarity determining region (LCDR)1 comprising an amino acid sequence according to SEQ ID NO: 27;
[0998] (b) an LCDR2 comprising an amino acid sequence according to SEQ ID NO: 30; and
[0999] (c) an LCDR3 comprising an amino acid sequence according to SEQ ID NO: 33.
[1000] Embodiment 92. The polyribonucleotide of embodiment 91, wherein the polyribonucleotide comprises a VL domain-encoding sequence, and wherein the VL domain-encoding sequence comprises:
[1001] (a) an LCDR1-encoding sequence that comprises or consists of a ribonucleic acid sequence according to SEQ ID NO: 28;
[1002] (b) an LCDR2-encoding sequence that comprises or consists of a ribonucleic acid sequence according to SEQ ID NO: 31; and
[1003] (c) an LCDR3-encoding sequence that comprises or consists of a ribonucleic acid sequence according to SEQ ID NO: 34.
[1004] Embodiment 93. The polyribonucleotide of embodiment 91 or 92, wherein the VL domain comprises or consists of an amino acid sequence according to SEQ ID NO: 43.
[1005] Embodiment 94. The polyribonucleotide of any one of embodiments 91-93, wherein the VL domain-encoding sequence comprises or consists of a ribonucleic acid sequence according to SEQ ID NO: 44 or 46.
[1006] Embodiment 95. The polyribonucleotide of any one of embodiments 91-94, wherein the immunoglobulin chain further comprises a CL domain, and wherein the VL domain is operably linked to the CL domain.
[1007] Embodiment 96. The polyribonucleotide of embodiment 95, wherein the CL domain is a kappa light chain constant domain.
[1008] Embodiment 97. The polyribonucleotide of embodiment 95 or 96, wherein the CL domain comprises or consists of an amino acid sequence according to SEQ ID NO: 149.
[1009] Embodiment 98. The polyribonucleotide of any one of embodiments 95-97, wherein the polyribonucleotide comprises a ribonucleic acid sequence that encodes the CL domain and comprises or consists of a sequence according to SEQ ID NO: 150.
[1010] Embodiment 99. The polyribonucleotide of embodiment 95 or 96, wherein the CL domain comprises one or more substitution mutations, wherein the one or more substitution mutations comprise or consist of E123K, Q124R, or a combination thereof, and wherein the substitution mutation positions are according to EU numbering.
[1011] Embodiment 100. The polyribonucleotide of any one of embodiments 95, 96, and 99, wherein the CL domain comprises or consists of an amino acid sequence according to SEQ ID NO: 155.
[1012] Embodiment 101. The polyribonucleotide of any one of embodiments 95, 96, 91, and 100, wherein the polyribonucleotide comprises a ribonucleic acid sequence that encodes the light chain constant domain and comprises or consists of a sequence according to SEQ ID NO: 156.
[1013] Embodiment 102. The polyribonucleotide of embodiment 95 or 96, wherein the CL domain comprises one or more substitution mutations, wherein the one or more substitution mutations comprise or consist of E123R, Q124K, or a combination thereof, and wherein the substitution mutation positions are according to EU numbering.
[1014] Embodiment 103. The polyribonucleotide of any one of embodiments 95, 96, and 102, wherein the CL domain comprises or consists of an amino acid sequence according to SEQ ID NO: 158.
[1015] Embodiment 104. The polyribonucleotide of any one of embodiments 95, 96, 102, and 103, wherein the polyribonucleotide comprises a ribonucleic acid sequence that encodes the light chain constant domain and comprises or consists of a sequence according to SEQ ID NO: 159.
[1016] Embodiment 105. The polyribonucleotide of embodiment 95 or 96, wherein the immunoglobulin chain comprises or consists of an amino acid sequence according to SEQ ID NO: 1313.
[1017] Embodiment 106. The polyribonucleotide of any one of embodiments 87, 88, and 97, wherein the polyribonucleotide comprises or consists of a ribonucleic acid sequence according to SEQ ID NO: 1312.
[1018] Embodiment 107. The polyribonucleotide of embodiment 95 or 96, wherein the immunoglobulin chain comprises or consists of an amino acid sequence according to SEQ ID NO: 1328.
[1019] Embodiment 108. The polyribonucleotide of any one of embodiments 95, 96, and 107, wherein the polyribonucleotide comprises or consists of a ribonucleic acid sequence according to SEQ ID NO: 1327.
[1020] Embodiment 109. The polyribonucleotide of embodiment 95 or 96, wherein the immunoglobulin chain comprises or consists of an amino acid sequence according to SEQ ID NO: 1355.
[1021] Embodiment 110. The polyribonucleotide of any one of embodiments 95, 96, and 109, wherein the polyribonucleotide comprises or consists of a ribonucleic acid sequence according to SEQ ID NO: 1354.
[1022] Embodiment 111. The polyribonucleotide of any one of embodiments 91-94, wherein the immunoglobulin chain further comprises a CH₁ domain, and wherein the VL domain is operably linked to the CH₁ domain.
[1023] Embodiment 112. The polyribonucleotide of embodiment 111, wherein the CH₁ domain comprises or consists of an amino acid sequence according to SEQ ID NO: 76.
[1024] Embodiment 113. The polyribonucleotide of embodiment 111 or 112, wherein the polyribonucleotide comprises a ribonucleic acid sequence that encodes the CH₁ domain and comprises or consists of a sequence according to SEQ ID NO: 77.
[1025] Embodiment 114. The polyribonucleotide of embodiment 111, wherein the CH₁ domain comprises or consists of an amino acid sequence according to SEQ ID NO: 81.
[1026] Embodiment 115. The polyribonucleotide of embodiment 111 or 112, wherein the polyribonucleotide comprises a ribonucleic acid sequence that encodes the CH₁ domain and comprises or consists of a sequence according to SEQ ID NO: 82.
[1027] Embodiment 116. The polyribonucleotide of embodiment 111, wherein the immunoglobulin chain comprises or consists of an amino acid sequence according to SEQ ID NO: 1322.
[1028] Embodiment 117. The polyribonucleotide of embodiment 111 or 112, wherein the polyribonucleotide comprises or consists of a ribonucleic acid sequence according to SEQ ID NO: 1321.
[1029] Embodiment 118. A polyribonucleotide encoding an immunoglobulin chain of an antibody agent, wherein the immunoglobulin chain comprises a heavy chain variable (VH) domain and a light chain variable (VL) domain,
[1030] wherein the VH domain comprises:
[1031] (a) an HCDR1 comprising an amino acid sequence according to SEQ ID NO: 18;
[1032] (b) an HCDR2 comprising an amino acid sequence according to SEQ ID NO: 21; and
[1033] (c) an HCDR3 comprising an amino acid sequence according to SEQ ID NO: 24; and
[1034] wherein the VL domain comprises:
[1035] (d) an LCDR1 comprising an amino acid sequence according to SEQ ID NO: 27;
[1036] (e) an LCDR2 comprising an amino acid sequence according to SEQ ID NO: 30; and
[1037] (f) an LCDR3 comprising an amino acid sequence according to SEQ ID NO: 33.
[1038] Embodiment 119. The polyribonucleotide of embodiment 118, wherein the polyribonucleotide comprises a VH domain-encoding sequence and a VL domain-encoding sequence,
[1039] wherein the VH domain-encoding sequence comprises:
[1040] (a) an HCDR1-encoding sequence that comprises or consists of the ribonucleic acid sequence according to SEQ ID NO: 19;
[1041] (b) the HCDR2-encoding sequence that comprises or consists of the ribonucleic acid sequence according to SEQ ID NO: 22; and
[1042] (c) the HCDR3-encoding sequence that comprises or consists of the ribonucleic acid sequence according to SEQ ID NO: 25; and
[1043] wherein the VL domain-encoding sequence comprises:
[1044] (d) an LCDR1-encoding sequence that comprises or consists of a ribonucleic acid sequence according to SEQ ID NO: 28;
[1045] (e) an LCDR2-encoding sequence that comprises or consists of a ribonucleic acid sequence according to SEQ ID NO: 31; and
[1046] (f) an LCDR3-encoding sequence that comprises or consists of a ribonucleic acid sequence according to SEQ ID NO: 34.
[1047] Embodiment 120. The polyribonucleotide of embodiment 118 or 119, wherein the immunoglobulin chain comprises a single chain fragment variable (scFv), and the scFv comprises the VH domain, a linker, and the VL domain.
[1048] Embodiment 121. The polyribonucleotide of embodiment 120, wherein the scFv comprises, in order:
[1049] (i) the VH domain comprising or consisting of an amino acid sequence according to SEQ ID NO: 36,
[1050] (ii) the linker, and
[1051] (iii) the VL domain comprising or consisting of an amino acid sequence according to SEQ ID NO: 43.
[1052] Embodiment 122. The polyribonucleotide of embodiment 120, wherein the scFv comprises, in order:
[1053] (i) the VL domain comprising or consisting of an amino acid sequence according to SEQ ID NO: 43,
[1054] (ii) the linker, and
[1055] (iii) the VH domain comprising or consisting of an amino acid sequence according to SEQ ID NO: 36.
[1056] Embodiment 123. The polyribonucleotide of any one of embodiments 120-122, wherein the immunoglobulin chain comprises a hinge domain following the scFv.
[1057] Embodiment 124. The polyribonucleotide of embodiment 123, wherein the hinge domain comprises or consists of an amino acid sequence according to SEQ ID NO: 161.
[1058] Embodiment 125. The polyribonucleotide of embodiment 123 or 124, wherein the polyribonucleotide comprises a ribonucleic acid sequence that encodes the hinge domain and comprises or consists of a sequence according to SEQ ID NO: 162.
[1059] Embodiment 126. The polyribonucleotide of embodiment 123, wherein the hinge domain comprises or consists of an amino acid sequence according to SEQ ID NO: 164.
[1060] Embodiment 127. The polyribonucleotide of embodiment 123 or 124, wherein the polyribonucleotide comprises a ribonucleic acid sequence that encodes the hinge domain and comprises or consists of a sequence according to SEQ ID NO: 165.
[1061] Embodiment 128. The polyribonucleotide of embodiment 123, wherein the hinge domain comprises or consists of an amino acid sequence according to SEQ ID NO: 167.
[1062] Embodiment 129. The polyribonucleotide of embodiment 123 or 124, wherein the polyribonucleotide comprises a ribonucleic acid sequence that encodes the hinge domain and comprises or consists of a sequence according to SEQ ID NO: 168.
[1063] Embodiment 130. The polyribonucleotide of any one of embodiments 118-129, wherein the immunoglobulin chain comprises one or more constant domains, and wherein the scFv is operably linked to the one or more constant domains.
[1064] Embodiment 131. The polyribonucleotide of any one of embodiments 123-130, wherein the immunoglobulin chain comprises one or more constant domain, and the hinge domain is between the scFv and the one or more constant domains.
[1065] Embodiment 132. The polyribonucleotide of embodiment 122 or 123, wherein the one or more constant domains comprise a CH₂ domain.
[1066] Embodiment 133. The polyribonucleotide of embodiment 132, wherein the CH₂ domain comprises or consists of a sequence according to SEQ ID NO: 96.
[1067] Embodiment 134. The polyribonucleotide of embodiment 132 or 133, wherein the polyribonucleotide comprises a ribonucleic acid sequence that encodes the CH₂ domain and comprises or consists of a sequence according to SEQ ID NO: 97.
[1068] Embodiment 135. The polyribonucleotide of embodiment 132, wherein the CH₂ domain comprises one or more substitution mutations, wherein the one or more substitution mutations comprise or consist of G236A, A330L, I332E, or a combination thereof, and wherein the substitution mutation positions are according to EU numbering.
[1069] Embodiment 136. The polyribonucleotide of embodiment 132 or 135, wherein the CH₂ domain comprises one or more substitution mutations, wherein the one or more substitution mutations comprise or consist of G236A, and wherein the substitution mutation positions are according to EU numbering.
[1070] Embodiment 137. The polyribonucleotide of embodiment 132 or 135, wherein the CH₂ domain comprises one or more substitution mutations, wherein the one or more substitution mutations comprise or consist of I332E, and wherein the substitution mutation positions are according to EU numbering.
[1071] Embodiment 138. The polyribonucleotide of embodiment 132 or 135, wherein the CH₂ domain comprises one or more substitution mutations, wherein the one or more substitution mutations comprise or consist of G236A and I332E, and wherein the substitution mutation positions are according to EU numbering.
[1072] Embodiment 139. The polyribonucleotide of embodiment 132 or 135, wherein the CH₂ domain comprises one or more substitution mutations, wherein the one or more substitution mutations comprise or consist of G236A, A330L, and I332E, and wherein the substitution mutation positions are according to EU numbering.
[1073] Embodiment 140. The polyribonucleotide of any one of embodiments 132, 135, and 139, wherein the CH₂ domain comprises or consists of an amino acid sequence according to SEQ ID NO: 99 or 102.
[1074] Embodiment 141. The polyribonucleotide of any one of embodiments 132, 135, 139, and 140, wherein the polyribonucleotide comprises a ribonucleic acid sequence that encodes the CH₂ domain and comprises or consists of a sequence according to SEQ ID NO: 100 or 103.
[1075] Embodiment 142. The polyribonucleotide of any one of embodiments 132, 135, and 138, wherein the CH₂ domain comprises or consists of an amino acid sequence according to SEQ ID NO: 104.
[1076] Embodiment 143. The polyribonucleotide of any one of embodiments 132, 135, 130 and 134, wherein the polyribonucleotide comprises a ribonucleic acid sequence that encodes the CH₂ domain and comprises or consists of a sequence according to SEQ ID NO: 105.
[1077] Embodiment 144. The polyribonucleotide of any one of embodiments 132, 135, and 136, wherein the CH₂ domain comprises or consists of an amino acid sequence according to SEQ ID NO: 107.
[1078] Embodiment 145. The polyribonucleotide of any one of embodiments 132, 135, 136, and 144, wherein the polyribonucleotide comprises a ribonucleic acid sequence that encodes the CH₂ domain and comprises or consists of a sequence according to SEQ ID NO: 108.
[1079] Embodiment 146. The polyribonucleotide of any one of embodiments 132, 135, and 137, wherein the CH₂ domain comprises or consists of an amino acid sequence according to SEQ ID NO: 110.
[1080] Embodiment 147. The polyribonucleotide of any one of embodiments 132, 135, 137, and 146, wherein the polyribonucleotide comprises a ribonucleic acid sequence that encodes the CH₂ domain and comprises or consists of a sequence according to SEQ ID NO: 111.
[1081] Embodiment 148. The polyribonucleotide of any one of embodiments 130-147, wherein the one or more constant domains comprise a CH₃ domain.
[1082] Embodiment 149. The polyribonucleotide of embodiment 148, wherein the CH₃ domain comprises or consists of a sequence according to SEQ ID NO: 113.
[1083] Embodiment 150. The polyribonucleotide of embodiment 148 or 149, wherein the polyribonucleotide comprises a ribonucleic acid sequence that encodes the CH₃ domain and comprises or consists of a sequence according to SEQ ID NO: 114.
[1084] Embodiment 151. The polyribonucleotide of embodiment 148, wherein the CH₃ domain comprises or consists of an amino acid sequence according to SEQ ID NO: 131.
[1085] Embodiment 152. The polyribonucleotide of embodiment 148 or 151, wherein the polyribonucleotide comprises a ribonucleic acid sequence that encodes the CH₃ domain and comprises or consists of a sequence according to SEQ ID NO: 132.
[1086] Embodiment 153. The polyribonucleotide of embodiment 148, wherein the CH₃ domain comprises one or more substitution mutations, wherein the one or more substitution mutations comprise or consist of M428L, N434S, or a combination thereof, and wherein the substitution mutation positions are according to EU numbering.
[1087] Embodiment 154. The polyribonucleotide of embodiment 148 or 153, wherein the CH₃ domain comprises or consists of an amino acid sequence according to SEQ ID NO: 116.
[1088] Embodiment 155. The polyribonucleotide of any one of embodiments 148, 153 and 154, wherein the polyribonucleotide comprises a ribonucleic acid sequence that encodes the CH₃ domain and comprises or consists of a sequence according to SEQ ID NO: 117.
[1089] Embodiment 156. The polyribonucleotide of embodiment 148 or 153, wherein the CH₃ domain comprises or consists of an amino acid sequence according to SEQ ID NO: 134.
[1090] Embodiment 157. The polyribonucleotide of any one of embodiments 148, 153 and 156, wherein the polyribonucleotide comprises a ribonucleic acid sequence that encodes the CH₃ domain and comprises or consists of a sequence according to SEQ ID NO: 135.
[1091] Embodiment 158. The polyribonucleotide of embodiment 148, wherein the CH₃ domain comprises one or more substitution mutations, wherein the one or more substitution mutations comprise or consist of Y349C, T366S, L368A, Y407V, or a combination thereof, and wherein the substitution mutation positions are according to EU numbering.
[1092] Embodiment 159. The polyribonucleotide of any one of embodiments 148, 153, and 148, wherein the CH₃ domain comprises one or more substitution mutations, wherein the one or more substitution mutations comprise or consist of Y349C, T366S, L368A, Y407V, M428L, N434S, or a combination thereof, and wherein the substitution mutation positions are according to EU numbering.
[1093] Embodiment 160. The polyribonucleotide of any one of embodiments 148, 153, 158, and 159, wherein the CH₃ domain comprises one or more substitution mutations, wherein the one or more substitution mutations comprise or consist of Y349C, T366S, L368A, Y407V, M428L, and N434S, and wherein the substitution mutation positions are according to EU numbering.
[1094] Embodiment 161. The polyribonucleotide of any one of embodiments 148, 153, and 158-160, wherein the CH₃ domain comprises or consists of an amino acid sequence according to SEQ ID NO: 122.
[1095] Embodiment 162. The polyribonucleotide of any one of embodiments 148, 153, and 158-161, wherein the polyribonucleotide comprises a ribonucleic acid sequence that encodes the CH₃ domain and comprises or consists of a sequence according to SEQ ID NO: 123.
[1096] Embodiment 163. The polyribonucleotide of any one of embodiments 148, 153, and 158-160, wherein the CH₃ domain comprises or consists of an amino acid sequence according to SEQ ID NO: 140.
[1097] Embodiment 164. The polyribonucleotide of any one of embodiments 148, 153, and 155, 158-160 wherein the polyribonucleotide comprises a ribonucleic acid sequence that encodes the CH₃ domain and comprises or consists of a sequence according to SEQ ID NO: 141.
[1098] Embodiment 165. The polyribonucleotide of embodiment 148, wherein the CH₃ domain comprises one or more substitution mutations, wherein the one or more substitution mutations comprise or consist of S354C, T366W, or a combination thereof, and wherein the substitution mutation positions are according to EU numbering.
[1099] Embodiment 166. The polyribonucleotide of any one of embodiments 148, 153, and 165, wherein the CH₃ domain comprises one or more substitution mutations, wherein the one or more substitution mutations comprise S354C, T366W, M428L, N434S, or a combination thereof, and wherein the substitution mutation positions are according to EU numbering.
[1100] Embodiment 167. The polyribonucleotide of any one of embodiments 148, 153, 165, and 166, wherein the CH₃ domain comprises one or more substitution mutations, wherein the one or more substitution mutations further comprise S354C, T366W, M428L, and N434S, and wherein the substitution mutation positions are according to EU numbering.
[1101] Embodiment 168. The polyribonucleotide of any one of embodiments 148, 153, and 165-167, wherein the CH₃ domain comprises or consists of an amino acid sequence according to SEQ ID NO: 128.
[1102] Embodiment 169. The polyribonucleotide of any one of embodiments 148, 153, and 165-168, wherein the polyribonucleotide comprises a ribonucleic acid sequence that encodes the CH₃ domain and comprises or consists of a sequence according to SEQ ID NO: 129.
[1103] Embodiment 170. The polyribonucleotide of any one of embodiments 148, 153, and 165-167, wherein the CH₃ domain comprises or consists of an amino acid sequence according to SEQ ID NO: 146.
[1104] Embodiment 171. The polyribonucleotide of embodiment any one of embodiments 148, 153, 165-167, and 170, wherein the polyribonucleotide comprises a ribonucleic acid sequence that encodes the CH₃ domain and comprises or consists of a sequence according to SEQ ID NO: 147.
[1105] Embodiment 172. The polyribonucleotide of any one of embodiments 121-171, wherein the linker comprises an amino acid sequence according to SEQ ID NO: 48.
[1106] Embodiment 173. The polyribonucleotide of any one of embodiments 121-172, wherein the polyribonucleotide comprises a ribonucleic acid sequence that encodes the linker and comprises or consists of a sequence according to SEQ ID NO: 49, 51, 53, 55, or 57.
[1107] Embodiment 174. The polyribonucleotide of any one of embodiments 121-171, wherein the linker comprises an amino acid sequence according to SEQ ID NO: 59.
[1108] Embodiment 175. The polyribonucleotide of any one of embodiments 121-171 and 174, wherein the polyribonucleotide comprises a ribonucleic acid sequence that encodes the linker and comprises or consists of a sequence according to SEQ ID NO: 60 or 62.
[1109] Embodiment 176. The polyribonucleotide of embodiment 120, wherein the immunoglobulin chain comprises or consists of a sequence according to SEQ ID NO: 1343.
[1110] Embodiment 177. The polyribonucleotide of embodiment 120 or 176, wherein the polyribonucleotide comprises or consists of a ribonucleic acid sequence according to SEQ ID NO: 1342.
[1111] Embodiment 178. The polyribonucleotide of embodiment 120, wherein the immunoglobulin chain comprises or consists of a sequence according to SEQ ID NO: 1346.
[1112] Embodiment 179. The polyribonucleotide of embodiment 120 or 178, wherein the polyribonucleotide comprises or consists of a ribonucleic acid sequence according to SEQ ID NO: 1345.
[1113] Embodiment 180. The polyribonucleotide of embodiment 120, wherein the immunoglobulin chain comprises or consists of a sequence according to SEQ ID NO: 1349.
[1114] Embodiment 181. The polyribonucleotide of embodiment 120 or 180, wherein the polyribonucleotide comprises or consists of a ribonucleic acid sequence according to SEQ ID NO: 1348.
[1115] Embodiment 182. The polyribonucleotide of embodiment 120, wherein the immunoglobulin chain comprises or consists of a sequence according to SEQ ID NO: 1352.
[1116] Embodiment 183. The polyribonucleotide of embodiment 120 or 182, wherein the polyribonucleotide comprises or consists of a ribonucleic acid sequence according to SEQ ID NO: 1351.
[1117] Embodiment 184. The polyribonucleotide of embodiment 120, wherein the immunoglobulin chain comprises or consists of a sequence according to SEQ ID NO: 1358, 1361, 1364, 1367, 1370, 1373, 1376, 1379, 1382, 1385, 1388, 1391, 1394, 1397, 1400, 1403, 1406, 1409, 1412, 1415, 1418, 1421, 1424, 1427, 1430, 1433, 1436, 1439, 1442, 1445, 1448, 1451, 1454, 1457, or 1460.
[1118] Embodiment 185. The polyribonucleotide of embodiment 120 or 184, wherein the polyribonucleotide comprises or consists of a ribonucleic acid sequence according to SEQ ID NO: 1357, 1360, 1363, 1366, 1369, 1372, 1375, 1378, 1381, 1384, 1387, 1390, 1393, 1396, 1399, 1402, 1405, 1408, 1411, 1414, 1417, 1420, 1423, 1426, 1429, 1432, 1435, 1438, 1441, 1444, 1447, 1450, 1453, 1456, or 1459.
[1119] Embodiment 186. The polyribonucleotide of any one of embodiments 1-185, wherein the polyribonucleotide comprises a ribonucleic acid sequence encoding a secretion signal.
[1120] Embodiment 187. The polyribonucleotide of embodiment 186, wherein the secretion signal comprises a ribonucleic acid sequence according to SEQ ID NO: 2, 4, 6, or 8.
[1121] Embodiment 188. The polyribonucleotide of any one of embodiments 1-187, wherein the polyribonucleotide comprises one or more non-coding sequence elements.
[1122] Embodiment 189. The polyribonucleotide of embodiment 188, wherein the one or more non-coding sequence elements enhances RNA stability and/or translation efficiency.
[1123] Embodiment 190. The polyribonucleotide of embodiment 188 or 189, wherein the one or more non-coding sequence elements comprise a 3′ untranslated region (UTR), a 5′ UTR, a 5′-cap, a polyadenine (polyA) tail, or combination thereof.
[1124] Embodiment 191. The polyribonucleotide of embodiment 190, wherein the polyA tail is or comprises a modified polyA sequence, preferably an interrupted polyA tail.
[1125] Embodiment 192. The polyribonucleotide of embodiment 191, wherein the polyA tail comprises or consists of a sequence that is at least 90% identical to SEQ ID NO: 16.
[1126] Embodiment 193. The polyribonucleotide of any one of embodiments 190-192, wherein the 3′ UTR comprises or consists of a nucleic acid sequence that is at least 90% identical to SEQ ID NO: 14.
[1127] Embodiment 194. The polyribonucleotide of any one of embodiments 190-193, wherein the 5′ UTR comprises or consists of a nucleic acid sequence that is at least 90% identical to SEQ ID NO: 10.
[1128] Embodiment 195. The polyribonucleotide of any one of embodiments 190-192, wherein the 5′-cap is (m₂^{7,3′}-O)Gppp(m^{2′-O})ApG.
[1129] Embodiment 196. The polyribonucleotide of any one of embodiments 1-195, wherein the polyribonucleotide comprises one or more modified ribonucleotides.
[1130] Embodiment 197. The polyribonucleotide of embodiment 196, wherein the one or more modified ribonucleotides comprise pseudouridine.
[1131] Embodiment 198. The polyribonucleotide of any one of embodiments 1-5, 91-94 and 118-122,
[1132] wherein the immunoglobulin chain further comprises:
[1133] (a) a CH₁ domain, a CH₂ domain, and a CH₃ domain,
[1134] (b) a CL domain, a CH₂ domain, and a CH₃ domain,
[1135] (c) a CL domain, or
[1136] (d) a CH₁ domain,
[1137] and wherein:
[1138] (i) the polyribonucleotide comprises a ribonucleic acid sequence that encodes a CH₂ domain, and the CH₂ domain comprises one or more substitution mutations, wherein the one or more substitution mutations comprise or consist of G236A, A330L, I332E, or a combination thereof,
[1139] (ii) the polyribonucleotide comprises a ribonucleic acid sequence that encodes a CH₃ domain, and the CH₃ domain comprises one or more substitution mutations, wherein the one or more substitution mutations comprise or consist of Y349C, S354C, T366S, T366W, L368A, Y407V, M428L, N434S, or a combination thereof,
[1140] (iii) the polyribonucleotide comprises a ribonucleic acid sequence that encodes a CH₁ domain, and the CH₁ domain comprises one or more substitution mutations, wherein the one or more substitution mutations comprise or consist of K147E, K213D, or a combination thereof,
[1141] (iv) the polyribonucleotide comprises a ribonucleic acid sequence that encodes a CL domain, and the CL domain comprises one or more substitution mutations, wherein the one or more substitution mutations comprise or consist of R108A, T109S, E123K, E123R, Q124E, Q124K, Q124R, or a combination thereof, or
[1142] (v) a combination thereof; wherein the substitution mutation positions are according to EU numbering.
[1143] Embodiment 199. The polyribonucleotide of any one of embodiments 1-4, wherein the polyribonucleotide comprises or consists of a ribonucleic acid sequence according to SEQ ID NO: 850.
[1144] Embodiment 200. The polyribonucleotide of any one of embodiments 1-4, wherein the polyribonucleotide comprises or consists of a ribonucleic acid sequence according to SEQ ID NO: 851.
[1145] Embodiment 201. The polyribonucleotide of any one of embodiments 1-4, wherein the polyribonucleotide comprises or consists of a ribonucleic acid sequence according to SEQ ID NO: 853.
[1146] Embodiment 202. The polyribonucleotide of any one of embodiments 1-4, wherein the polyribonucleotide comprises or consists of a ribonucleic acid sequence according to SEQ ID NO: 900.
[1147] Embodiment 203. The polyribonucleotide of any one of embodiments 1-4, wherein the polyribonucleotide comprises or consists of a ribonucleic acid sequence according to SEQ ID NO: 901.
[1148] Embodiment 204. The polyribonucleotide of any one of embodiments 1-4, wherein the polyribonucleotide comprises or consists of a ribonucleic acid sequence according to SEQ ID NO: 905.
[1149] Embodiment 205. The polyribonucleotide of any one of embodiments 1-4, wherein the polyribonucleotide comprises or consists of a ribonucleic acid sequence according to SEQ ID NO: 906.
[1150] Embodiment 206. The polyribonucleotide of any one of embodiments 1-4, wherein the polyribonucleotide comprises or consists of a ribonucleic acid sequence according to SEQ ID NO: 910.
[1151] Embodiment 207. The polyribonucleotide of any one of embodiments 1-4, wherein the polyribonucleotide comprises or consists of a ribonucleic acid sequence according to SEQ ID NO: 950.
[1152] Embodiment 208. The polyribonucleotide of any one of embodiments 91-94, wherein the polyribonucleotide comprises or consists of a ribonucleic acid sequence according to SEQ ID NO: 898.
[1153] Embodiment 209. The polyribonucleotide of any one of embodiments 91-94, wherein the polyribonucleotide comprises or consists of a ribonucleic acid sequence according to SEQ ID NO: 947.
[1154] Embodiment 210. The polyribonucleotide of any one of embodiments 91-94, wherein the polyribonucleotide comprises or consists of a ribonucleic acid sequence according to SEQ ID NO: 997.
[1155] Embodiment 211. The polyribonucleotide of any one of embodiments 118-122, wherein the polyribonucleotide comprises or consists of a ribonucleic acid sequence according to SEQ ID NO: 1000.
[1156] Embodiment 212. The polyribonucleotide of any one of embodiments 118-122, wherein the polyribonucleotide comprises or consists of a ribonucleic acid sequence according to SEQ ID NO: 1048.
[1157] Embodiment 213. The polyribonucleotide of any one of embodiments 118-122, wherein the polyribonucleotide comprises or consists of a ribonucleic acid sequence according to SEQ ID NO: 1096.
[1158] Embodiment 214. The polyribonucleotide of any one of embodiments 118-112, wherein the polyribonucleotide comprises or consists of a ribonucleic acid sequence according to SEQ ID NO: 1144.
[1159] Embodiment 215. A polyribonucleotide comprising or consisting of a ribonucleic acid sequence according to any one of SEQ ID NO: 850-1190.
[1160] Embodiment 216. The polyribonucleotide of any one of embodiments 1-215, wherein the polyribonucleotide is a non-natural polyribonucleotide.
[1161] Embodiment 217. The polyribonucleotide of any one of embodiments 1-216, wherein the polyribonucleotide is an engineered polyribonucleotide.
[1162] Embodiment 218. The polyribonucleotide of any one of embodiments 1-217, wherein the polyribonucleotide is an isolated polyribonucleotide.
[1163] Embodiment 219. A plurality of polyribonucleotides comprising three or more different polyribonucleotides,
[1164] wherein each polyribonucleotide of the three or more different polyribonucleotides encodes an immunoglobulin chain,
[1165] wherein each of the three or more different polyribonucleotides encode a different immunoglobulin chain,
[1166] wherein at least one of the polyribonucleotides of the plurality is a polyribonucleotide of any one of embodiments 1-218, and
[1167] wherein, when immunoglobulin chains are expressed from the three or more different polyribonucleotides in a cell, the immunoglobulin chains form:
[1168] (a) at least two different antibody agents; and
[1169] (b) at most (2x+n+1)/2 different antibody agents, wherein x is equal to the number of polyribonucleotides in the three or more polyribonucleotides that encode an immunoglobulin chain comprising an scFV, and n is equal to the number of polyribonucleotides in the three or more polyribonucleotides minus x.
[1170] Embodiment 220. A composition comprising one or more polyribonucleotides of any one of embodiments 1-218.
[1171] Embodiment 221. The composition of embodiment 220, wherein the one or more polyribonucleotides comprise or consist of:
[1172] (a) the polyribonucleotide of embodiment 63 or 64; and
[1173] (b) the polyribonucleotide of embodiment 105 or 106.
[1174] Embodiment 222. The composition of embodiment 220, wherein the one or more polyribonucleotides comprise or consist of:
[1175] (a) the polyribonucleotide of embodiment 65 or 66; and
[1176] (b) the polyribonucleotide of embodiment 105 or 106.
[1177] Embodiment 223. The composition of embodiment 220, wherein the one or more polyribonucleotides comprise or consist of:
[1178] (a) the polyribonucleotide of embodiment 67 or 68; and
[1179] (b) the polyribonucleotide of embodiment 105 or 106.
[1180] Embodiment 224. The composition of embodiment 220, wherein the one or more polyribonucleotides comprise or consist of:
[1181] (a) the polyribonucleotide of embodiment 81 or 82; and
[1182] (b) the polyribonucleotide of embodiment 116 or 117.
[1183] Embodiment 225. The composition of embodiment 220, wherein the one or more polyribonucleotides comprise or consist of:
[1184] (a) the polyribonucleotide of embodiment 83 or 84; and
[1185] (b) the polyribonucleotide of embodiment 116 or 117.
[1186] Embodiment 226. The composition of embodiment 220, wherein the one or more polyribonucleotides comprise or consist of:
[1187] (a) the polyribonucleotide of embodiment 85 or 86; and
[1188] (b) the polyribonucleotide of embodiment 116 or 117.
[1189] Embodiment 227. The composition of embodiment 220, wherein the one or more polyribonucleotides comprise or consist of:
[1190] (a) the polyribonucleotide of embodiment 87 or 88; and
[1191] (b) the polyribonucleotide of embodiment 116 or 117.
[1192] Embodiment 228. The composition of embodiment 220, wherein the one or more polyribonucleotides comprise or consist of:
[1193] (a) the polyribonucleotide of embodiment 89 or 90; and
[1194] (b) the polyribonucleotide of embodiment 116 or 117.
[1195] Embodiment 229. The composition of embodiment 220, wherein the one or more polyribonucleotides comprise or consist of:
[1196] (a) the polyribonucleotide of embodiment 69 or 70; and
[1197] (b) the polyribonucleotide of embodiment 107 or 108.
[1198] Embodiment 230. The composition of embodiment 220, wherein the one or more polyribonucleotides comprise or consist of:
[1199] (a) the polyribonucleotide of embodiment 69 or 70; and
[1200] (b) the polyribonucleotide of embodiment 109 or 110.
[1201] Embodiment 231. The composition of any one of embodiments 220-230, wherein the composition further comprises lipid nanoparticles, polyplexes (PLX), lipidated polyplexes (LPLX), or liposomes, wherein the one or more polyribonucleotides are fully or partially encapsulated within the lipid nanoparticles, polyplexes (PLX), lipidated polyplexes (LPLX), or liposomes.
[1202] Embodiment 232. The composition of any one of embodiments 220-231, wherein the composition further comprises lipid nanoparticles, wherein the one or more polyribonucleotides are encapsulated within the lipid nanoparticles.
[1203] Embodiment 233. The composition of embodiment 232, wherein the lipid nanoparticles target liver cells.
[1204] Embodiment 234. The composition of embodiment 232, wherein the lipid nanoparticles target secondary lymphoid organ cells.
[1205] Embodiment 235. The composition of embodiment 232, wherein the lipid nanoparticles target lung cells.
[1206] Embodiment 236. The composition of embodiment any one of embodiments 231-235, wherein the lipid nanoparticles are cationic lipid nanoparticles.
[1207] Embodiment 237. The composition of any one of embodiments 231-236, wherein the lipid nanoparticles each comprise:
[1208] (a) a polymer-conjugated lipid;
[1209] (b) a cationic lipid; and
[1210] (c) one or more neutral lipids.
[1211] Embodiment 238. The composition of embodiment 237, wherein the polymer-conjugated lipid comprises a PEG-conjugated lipid.
[1212] Embodiment 239. The composition of embodiment 237 or 238, wherein the polymer-conjugated lipid comprises 2-[(polyethylene glycol)-2000]-N,N-ditetradecylacetamide.
[1213] Embodiment 240. The composition of any one of embodiments 237-239, wherein the one or more neutral lipids comprise 1,2-Distearoyl-sn-glycero-3-phosphocholine (DPSC).
[1214] Embodiment 241. The composition of any one of embodiments 237-240, wherein the one or more neutral lipids comprise cholesterol.
[1215] Embodiment 242. The composition of any one of embodiments 237-241, wherein the cationic lipid comprises ((3-hydroxypropyl)azanediyl)bis(nonane-9,1-diyl) bis(2-butyloctanoate).
[1216] Embodiment 243. The composition of any one of embodiments 237-242, wherein the lipid nanoparticles each comprise:
[1217] (a) 2-[(polyethylene glycol)-2000]-N,N-ditetradecylacetamide;
[1218] (b) DPSC;
[1219] (c) cholesterol; and
[1220] (d) ((3-hydroxypropyl)azanediyl)bis(nonane-9,1-diyl) bis(2-butyloctanoate).
[1221] Embodiment 244. The composition of any one of embodiments 237-243, wherein the lipid nanoparticles comprise:
[1222] (a) the polymer-conjugated lipid at about 1-2.5 mol % of the total lipids;
[1223] (b) the cationic lipid at 35-65 mol % of the total lipids; and
[1224] (c) the one or more neutral lipids are present in 35-65 mol % of the total lipids.
[1225] Embodiment 245. The composition of any one of embodiments 220-244, wherein the lipid nanoparticles have an average diameter of about 50-150 nm.
[1226] Embodiment 246. A pharmaceutical composition comprising the composition of any one of embodiments 220-245 and at least one pharmaceutically acceptable excipient.
[1227] Embodiment 247. The pharmaceutical composition of embodiment 246, wherein the pharmaceutical comprises a cryoprotectant.
[1228] Embodiment 248. The pharmaceutical composition of embodiment 246 or 247, wherein the pharmaceutical comprises an aqueous buffered solution.
[1229] Embodiment 249. A method comprising administering the pharmaceutical composition of any one of embodiments 246-248 to a subject.
[1230] Embodiment 250. The pharmaceutical composition of any one of embodiments 246-248 for use in the treatment of HIV comprising administering the pharmaceutical composition to a subject.
[1231] Embodiment 251. The pharmaceutical composition of any one of embodiments 246-248 for use in the prevention of HIV comprising administering the pharmaceutical composition to a subject.
[1232] Embodiment 252. The method of embodiment 249 or the pharmaceutical composition for use according to embodiment 250 or 251, wherein administering the pharmaceutical composition to the subject results in expression in the subject of:
[1233] (a) the immunoglobulin chain of antibody agent;
[1234] (b) the antibody agent; or
[1235] (c) both.
[1236] Embodiment 253. The method of embodiment 249 or 252 or the pharmaceutical composition for use according to any one of embodiments 250-252, wherein the immunoglobulin chain of antibody agent, the antibody agent, or both is expressed in the subject at a titer of:
[1237] (a) at least 1 μg/ml in plasma; or
[1238] (b) at least 1 μg/ml in serum.
[1239] Embodiment 254. The method of any one of embodiments 249, 252, and 253 or the pharmaceutical composition for use according to any one of embodiments 261-264, wherein the antibody agent exhibits a geometric mean IC50 of five neutralized strains of less than 0.3 μg/ml against the neutralized strains of a global reference panel when tested in the TZM-bl cell pseudovirus neutralization assay at antibody agent concentrations up to 25 μg/ml.
[1240] Embodiment 255. The method of any one of embodiments 249 and 252-254 or the pharmaceutical composition for use according to any one of embodiments 250-254, wherein the antibody agent is capable of neutralizing one or more HIV strains when tested in the TZM-bl cell pseudovirus neutralization assay at antibody agent concentrations up to 25 μg/ml.
[1241] Embodiment 256. The method of any one of embodiments 249 and 252-255 or the pharmaceutical composition for use according to any one of embodiments 250-255, wherein the antibody agent is capable of neutralizing one or more HIV strains at a level that is within 3-fold of a level of an equivalent amount of recombinant benchmark antibody.
[1242] Embodiment 257. The method or the pharmaceutical composition for use of embodiment 256, wherein the recombinant benchmark antibody is an unmodified wild-type IgG antibody comprising the same HCDR1, HCDR2, HCDR2, LCDR1, LCDR2, and LCDR3 as the antibody agent.
[1243] Embodiment 258. The method of any one of embodiments 249 and 252-257 or the pharmaceutical for use according to any one of embodiments 250-257, wherein administering the pharmaceutical composition to the subject comprises administering one or more doses of the pharmaceutical composition to the subject.
[1244] Embodiment 259. The method or the pharmaceutical composition for use of embodiment 258, wherein the one or more doses of the pharmaceutical composition are administered to the subject weekly.
[1245] Embodiment 260. The method or the pharmaceutical composition for use of embodiment 258, wherein the one or more doses of the pharmaceutical composition are administered to the subject bi-weekly.
[1246] Embodiment 261. The method of any one of embodiments 249 and 252-260 or the pharmaceutical composition for use according to any one of embodiments 250-260, wherein the pharmaceutical composition is administered intravenously.
[1247] Embodiment 262. The method of any one of embodiments 249 and 252-260 or the pharmaceutical composition for use according to any one of embodiments 250-260, wherein the pharmaceutical composition is administered intramuscularly.
[1248] Embodiment 263. The method of any one of embodiments 249 and 252-260 or the pharmaceutical composition for use according to any one of embodiments 250-260, wherein the pharmaceutical composition is administered subcutaneously.
[1249] Embodiment 264. The method of any one of embodiments 249 and 252-263 or the pharmaceutical composition for use according to any one of embodiments 250-263, wherein the subject has or is at risk of developing an HIV infection.
[1250] Embodiment 265. The method of any one of embodiments 249 and 252-264, wherein the method is a method of treating an HIV infection.
[1251] Embodiment 266. The method of any one of embodiments 249 and 252-264, wherein the method is a method of preventing an HIV infection.
[1252] Embodiment 267. Use of the composition of any one of embodiments 220-245 or the pharmaceutical composition of any one of embodiments 246-248 for the treatment of HIV in a subject.
[1253] Embodiment 268. Use of the composition of any one of embodiments 220-245 or the pharmaceutical composition of any one of embodiments 246-248 for the prevention of HIV in a subject.
[1254] Embodiment 269. The use of embodiment 267 or 268, wherein the subject has or is at risk of developing an HIV infection.
[1255] Embodiment 270. A method of producing an antibody agent comprising administering to cells the composition of any one of embodiments 220-245 or the pharmaceutical composition of any one of embodiments 246-248 so that the cells express and secrete the antibody agent.
[1256] Embodiment 271. The method of embodiment 270, wherein the cells are liver cells.
[1257] Embodiment 272. The method of embodiment 270 or 271, wherein the cells are in a subject.
[1258] Embodiment 273. The method of embodiment 270 or 271, wherein the cells are ex vivo cells.
[1259] Embodiment 274. The method of embodiment 272, wherein the antibody agent is produced at a therapeutically relevant plasma concentration or a therapeutically relevant serum concentration.
[1260] Embodiment 275. The method of embodiment 274, wherein the therapeutically relevant plasma concentration or the therapeutically relevant serum concentration is at least 1 μg/ml.
[1261] Embodiment 276. A method comprising a step of:
[1262] determining one or more features of an antibody agent expressed from the polyribonucleotide of any one of embodiments 1-218, the composition of any one of embodiments 220-245, or the pharmaceutical composition of any one of embodiments 246-248 introduced into cells, wherein the one or more features comprises: (i) protein expression level of the antibody agent; (ii) binding specificity of the antibody agent to the Apex binding site of HIV; (iii) efficacy of the antibody agent to mediate target cell death through antibody-dependent cellular cytotoxicity (ADCC); and (iv) efficacy of the antibody agent to mediate target cell death through complement dependent cytotoxicity (CDC).
[1263] Embodiment 277. A method comprising the steps of:
[1264] contacting cells with the polyribonucleotide of any one of embodiments 1-218, the composition of any one of embodiments 220-245, or the pharmaceutical composition of any one of embodiments 246-245 introduced into cells; and
[1265] detecting the antibody agent produced by the cells.
[1266] Embodiment 278. The method of embodiment 276, the method further comprising steps of:
[1267] contacting cells with the polyribonucleotide of any one of embodiments 1-218, the composition of any one of embodiments 220-245, or the pharmaceutical composition of any one of embodiments 246-248 introduced into cells; and
[1268] detecting the antibody agent produced by the cells.
[1269] Embodiment 279. The method of embodiment 277 or 278, wherein the cells are liver cells.
[1270] Embodiment 280. The method of any one of embodiments 277-279, wherein the step of determining comprises comparing the one or more features of the antibody agent with that of a reference antibody that specifically binds to a Apex binding site of HIV.
[1271] Embodiment 281. The method of any one of embodiments 277-280, wherein the step of determining comprises assessing the protein expression level of the antibody agent above a threshold level.
[1272] Embodiment 282. The method of embodiment 281, wherein the threshold level is a level that is sufficient to induce ADCC.
[1273] Embodiment 283. The method of any one of embodiments 276-282, wherein the step of determining comprises assessing binding of the antibody agent to a Apex binding site of HIV.
[1274] Embodiment 284. The method of any one of embodiments 276-283, wherein the step of determining comprises assessing the antibody agent in the TZM-bl cell pseudovirus neutralization assay at antibody agent concentrations up to 25 μg/ml.
[1275] Embodiment 285. The method of any one of embodiments 276-284, wherein the cells are present in a subject.
[1276] Embodiment 286. The method of any one of embodiments 276-284, wherein the cells are ex vivo cells.
[1277] Embodiment 287. The method of embodiment 285, wherein the one or more features include antibody level in one or more tissues in the subject.
[1278] Embodiment 288. A method of manufacture, the method comprising steps of:
[1279] (A) determining one or more features of a polyribonucleotide of any one of embodiments 1-218, the composition of any one of embodiments 220-245, or the pharmaceutical composition of any one of embodiments 246-248, which one or more features comprise or consist of:
   [1280] (i) length and/or sequence of the polyribonucleotide;
   [1281] (ii) integrity of the polyribonucleotide;
   [1282] (iii) presence and/or location of one or more chemical moieties of the polyribonucleotide;
   [1283] (iv) extent of expression of the antibody agent when the polyribonucleotide is introduced into a cell;
   [1284] (v) stability of the polyribonucleotide or composition thereof;
   [1285] (vi) level of antibody agent in a biological sample from an organism into which the polyribonucleotide has been introduced;
   [1286] (vii) binding specificity of the antibody agent expressed from the polyribonucleotide, optionally to a Apex binding site of HIV;
   [1287] (viii) efficacy of the antibody agent to mediate target cell death through ADCC;
   [1288] (ix) efficacy of the antibody agent to mediate target cell death through complement dependent cytotoxicity (CDC);
   [1289] (x) lipid identity and amount/concentration within the composition;
   [1290] (xi) size of lipid nanoparticles within the composition;
   [1291] (xii) polydispersity of lipid nanoparticles within the composition;
   [1292] (xiii) amount/concentration of the polyribonucleotide within the composition;
   [1293] (xiv) extent of encapsulation of the polyribonucleotide within lipid nanoparticles;
   [1294] (xv) a level of double stranded RNA; and
   [1295] (xvi) combinations thereof;
[1296] (B) comparing the one or more features of the polyribonucleotide with that of an appropriate reference standard; and
[1297] (C) (i) designating the polyribonucleotide or composition thereof for one or more further steps of manufacturing and/or distribution if the comparison demonstrates that the polyribonucleotide or composition thereof meets or exceeds the reference standard; or
   [1298] (ii) taking an alternative action if the comparison demonstrates that the polyribonucleotide or composition thereof does not meet or exceed the reference standard.
[1299] Embodiment 289. The method of embodiment 288, wherein the polyribonucleotide is assessed and the one or more further steps of step (C)(i) are or comprise at least formulation of the polyribonucleotide.
[1300] Embodiment 290. The method of embodiment 288 or 289, wherein the composition or the pharmaceutical composition is assessed, and the one or more further steps of step (C)(i) are or comprise release and distribution of the composition or the pharmaceutical composition.

### EXEMPLIFICATION

### Example 1: Selection of Exemplary Antibody Agents

[1301] The present Example demonstrates exemplary antibody agents specific for HIV that can be selected to be expressed (alone or in combination) from one or more polyribonucleotides, and formulations comprising said polyribonucleotides encoding antibody agent(s). This Example also provides methods by which specific antibody agents can be selected to be encoded by one or more polyribonucleotides, wherein the one or more polyribonucleotides can be used in a composition, e.g., for administration as a therapeutic for treatment or prevention of HIV.

[1302] As discussed herein, HIV has an extremely high mutational rate, which enables HIV to evade a subject's immune response, as well as treatments targeting certain epitopes. Thus, an antibody agent must be able to target a breadth of HIV polypeptides and/or polypeptide variants. Antibody agents selected herein are chosen for their ability to target a sufficient number of HIV polypeptides and/or polypeptide variants at a relatively low concentration to control viremia and clear infected cells. Antibody agents selected herein can be used alone, but also can be used in combination to increase the breadth of HIV polypeptides and/or polypeptide variants it is able to target.

[1303] The broadly neutralizing antibody (bNAb) “PGDM1400” was identified as a candidate for further experiments alone or in combination with other bNAbs. As discussed herein, PGDM1400 is a natural antibody isolated from an HIV subject. It has been reported that, as compared with other bNAbs (e.g., PGT121, PGT128, or PGT151, which are among the most potent bNAbs to date), PGDM1400 exhibits high neutralization breadth and potency measured on a 106-viral panel (Sok, Devin, et al., “Recombinant HIV envelope trimer selects for quaternary-dependent antibodies targeting the trimer apex.” Proceedings of the National Academy of Sciences 111.49 (2014): 17624-17629; van der Velden, Yme U., et al. “Diverse HIV-1 escape pathways from broadly neutralizing antibody PGDM1400 in humanized mice.” Mabs. 12.1 (2020) e1845908, which are incorporated herein by reference in their entirety).

[1304] Because PGDM1400 has been able to outperform other anti-HIV antibodies, PGDM1400 was selected for further assessment, including modification of its antibody format to permit administration of polyribonucleotides encoding an antibody agent having at least the PGDM1400 variable domains, particularly when administered with polyribonucleotides encoding other anti-HIV antibody agents. Development of polyribonucleotides encoding PGDM1400 antibody agents was also performed, as described herein.

[1305] Combinations of antibody agents comprising PGDM1400 were also assessed. As discussed herein, the present disclosure provides the insight that administering polyribonucleotides encoding multiple anti-HIV antibody agents can be a particularly powerful approach for broadly neutralizing a number of HIV strains and for minimizing evasion of the antibody agents by HIV variants. Accordingly, combinations including PGDM1400 with other antibody agents were tested for potency. Selection of additional antibody agents for use in combination with PGDM1400 was assessed using Combinaber, an online tool based on Bliss-Hill combination prediction model on an HIV global panel (Wagh et al., Plos Path 2016). (https://www.hiv.lanl.gov/content/sequence/COMBINABER/combinaber.html). In order apply the Bliss-Hill model, the IC80 values at <0.1 μg/ml, <1 μg/ml and <10 μg/ml of the antibody agents (here, bNAbs) were determined. Data from the exemplary combinations of bNAbs with PGDM1400 are shown in the Table 11 below.

TABLE 11
IC80 data obtained with various combinations including PGDM1400 and other antibody agents.

| | | % Coverage at (overall Rank*) | | |
|---|---|---|---|---|
| | | IC80 < 0.1 μg/ml | IC80 < 1 μg/ml | IC80 < 10 μ′g/ml |
| 2 bNAb | PGDM1400 + bNAb002 | 61.24% (2) | 91.01% (2) | 97.19% (2) |
| 3 bNAb | PGDM1400 + bNAb002 + bNAb003 | 69.66% (5) | 98.31% (1) | 100.00% (6) |
| | PGDM1400 + bNAb002 + bNAb004 | 70.22% (6) | 96.63% (12) | 99.44% (11) |
| | PGDM1400 + bNAb002 + bNAb005 | 68.54% (11) | 96.07% (9) | 99.44% (4) |
| 4 bNAb | PGDM1400 + bNAb002 + bNAb005 + | 79.78% (10) | 100.00% (5) | 100.00% (10) |
| | bNAb003 | | | |
| | PGDM1400 + bNAb002 + bNAb005 + | 78.65% (13) | 99.43% (9) | 100.00% (14) |
| | bNAb004 | | | |

[1306] This data confirms that PGDM1400, while having excellent breadth and potency, can be used with other anti-HIV antibody agents to further increase breadth and potency that can be achieved by a pharmaceutical composition.

### Example 2: Generation of Polyribonucleotides Encoding PGDM1400 IgG Antibody Agents

[1307] The present Example demonstrates the generation of polyribonucleotide sequences encoding an anti-HIV antibody agent. The present Example further demonstrates that such polyribonucleotides can be designed so that transient in vivo antibody agent production following i.v./i.m./s.c. delivery of the one or more polyribonucleotides can be achieved.

[1308] Specifically, ribonucleic acid sequences encoding the heavy and light chain variable domains of PGDM1400 can be recombinantly combined with other immunoglobulin domains to form polyribonucleotides that encoded PGDM1400 antibody agent immunoglobulin chains. The resulting polyribonucleotides were cloned into the JR81 DNA plasmid. The polyribonucleotides that encoded PGDM1400 antibody agents having different formats, including a conventional IgG1, an scFv-Fc, a CrossMab^{CH1-CLx}, a CrossMab^{CH1-CLcv}, and knob-in-hole formats (see e.g., FIGS. 4-5). Exemplary PGDM1400 antibody agent configurations and component immunoglobulin chains are shown in Table 2.

[1309] Methods of the present example include:
[1310] (1) Cloning of DNA fragments into a DNA plasmid appropriate to use for RNA expression (e.g., JR81). An appropriate DNA plasmid may encode RNA features including, for example, a 5′ untranslated region (e.g., one that is derived from human α-globin mRNA (hAg)), a Kozak sequence, a signal peptide sequence (e.g., husec2)), and/or a 3′ untranslated region (e.g., one that is a combination of two sequence elements (FI element) and/or a polyA tail 30Linker70 (A30L70)). Examples of appropriate DNA plasmids can be found in WO2021214204A1, which is hereby incorporated by reference in its entirety; and
[1311] (2) Verification of selected clones by control digestion and sequencing.

### Codon Optimization

[1312] For optimal expression of the antibody in human cells, the genes for the IgG light chain and heavy chain were generated based on the amino acid sequence of PGDM1400. Sok, Devin, et al., “Recombinant HIV envelope trimer selects for quaternary-dependent antibodies targeting the trimer apex.” Proceedings of the National Academy of Sciences 111.49 (2014): 17624-17629, which is incorporated herein by reference in its entirety. The amino acid sequence was translated to DNA nucleotide sequence. Restriction sites for Eam1104I (GAAGAG), BamHI (GGATCC), PstI (CTGCAG), SbfI (CCTGCAGG), XhoI (CTCGAG), SpeI (ACTAGT), BspEI (TCCGGA), SacI (GAGCTC), Earl (CTCTTCN\hat{ }NNN) and NheI (GCTAGC) were eliminated after optimization, because these enzymes were intended to be used either for linearization (Eam1104I) or for cloning (other listed enzymes) of the plasmid. Sequences were also examined for the presence of regions showing high homology to the T7 RNA polymerase termination signal sequence “ATCTGTT” followed by multiple “T” residues.

[1313] Optimization was carried out with the GeneOptimizer® software provided by Life Technologies GmbH GeneArt®. This software adjusts the codon usage by using the most frequent codons and adapts the GC-content of an uploaded sequence for a chosen expression system, in this case Homo sapiens. At the same time, GeneOptimizer® removes sequence repeats, introns, cryptic splice sites, internal ribosome entry sites and RNA destabilizing sequence elements (e.g., UpA-dinucleotides), adds RNA stabilizing sequence elements (e.g., CpG-dinucleotides) and avoids stable RNA secondary structures as well as unwanted sequences such as restriction sites. The output sequence was not further manipulated and used as it was for analysis and ordering of DNA fragment strings. Those of skill in the art would be aware that alternative methods for codon optimization are available. Moreover, additional information on codon optimization approaches is provided herein.

### Cloning Strategy

[1314] Each light chain and heavy chain sequence was cloned into JR81 (pST1-4-AGA-ATAA-hAg-Kozak-GOI-Bam-F-I-No_Lig3-A30LA70) for putative clinical application via SpeI and BamHI restriction sites. For this purpose, the parental JR81 plasmid was digested with the restriction enzymes SpeI and BamHI. The resulting product was analyzed via agarose gel, purified and its concentration measured by UV spectroscopy. The antibody encoding light chain and heavy chain sequences containing complimentary 5′ and 3′ overhangs matching the SpeI and BamHI adjacent plasmid regions, were cloned into the JR81 plasmid by in vivo assembly. Garcia-Nafria, “IVA cloning: A single-tube universal cloning system exploiting bacterial In Vivo Assembly,” Scientific Reports volume 6, Article number: 27459 (2016), which is incorporated herein by reference in its entirety.

[1315] In short, digested JR81 plasmid and antibody encoding sequences were mixed and competent Escherichia coli cells were transformed via heat shock. Clones were sequence verified by Sanger sequencing. Sequencing results were aligned to the reference sequence. The nucleotide sequence of the resulting heavy chain- and light chain-encoding plasmid constructs as well as the sequence of the backbone can be found in SEQ ID NOs: 1305, 1308, and 1314 (heavy chain) and SEQ ID NO: 1311 (light chain). Such sequences encode heavy chain amino acid sequences shown in SEQ ID NOs: 1307, 1310, and 1316 and encode light chain amino acid sequence shown in SEQ ID NO: 1313.

[1316] Exemplary sequences used in the cloning methods above are shown in Table 12 below.

TABLE 12
Exemplary sequences used in PGDM1400 antibody agent encoding_polyribonucleotides.

| Feature | Fragment | Nucleotide Sequence |
|---|---|---|
| General | CH1-Hinge-CH2-CH3 | GCCTCTACAAAGGGCCCTAGCGTGTTCCCTCTGGCTCCTAGCAGCAAGT |
| | (G1m3) | CGACATCTGGCGGAACAGCCGCTCTGGGCTGTCTGGTCAAGGACTACTT |
| | | TCCCGAGCCTGTGACAGTGTCCTGGAACTCTGGCGCTCTGACAAGCGG |
| | | CGTGCACACATTTCCAGCCGTGCTGCAAAGCAGCGGCCTGTACTCTCTG |
| | | AGCAGCGTGGTCACAGTGCCAAGCTCTAGCCTGGGCACCCAGACCTACA |
| | | TCTGCAATGTGAACCACAAGCCTAGCAACACCAAGGTGGACAAGCGCGT |
| | | GGAACCCAAGAGCTGCGACAAGACCCACACCTGTCCTCCATGTCCTGCT |
| | | CCAGAACTGCTCGGCGGACCTTCCGTGTTCCTGTTTCCTCCAAA |
| | | GCCTAAGGACACCCTGATGATCAGCAGAACCCCTGAAGTGACCT |
| | | GCGTGGTGGTGGATGTGTCTCACGAGGACCCCGAAGTGAAGTT |
| | | CAATTGGTACGTGGACGGCGTGGAAGTGCACAACGCCAAGACC |
| | | AAGCCTAGAGAGGAACAGTACAACAGCACCTACAGAGTGGTGTC |
| | | CGTGCTGACAGTGCTGCACCAGGATTGGCTGAACGGCAAAGAG |
| | | TACAAGTGCAAGGTGTCCAACAAGGCCCTGCCTGCTCCTATCGA |
| | | GAAAACCATCAGCAAGGCCAAGGGCCAGCCTAGGGAACCCCAGGTT |
| | | TACACACTGCCTCCAAGCCGCGAGGAAATGACCAAGAACCAGGTGTCCC |
| | | TGACCTGCCTCGTGAAGGGCTTCTACCCTTCCGATATCGCCGTGGAATG |
| | | GGAGAGCAATGGCCAGCCTGAGAACAACTACAAGACAACCCCTCCTGTG |
| | | CTGGACAGCGACGGCTCATTCTTCCTGTACAGCAAGCTGACTGTGGATA |
| | | AGTCCCGGTGGCAGCAGGGCAACGTGTTCAGCTGTTCTGTGATGCACG |
| | | AAGCCCTGCACAACCACTACACCCAGAAAAGCCTGTCTCTGAGCCCCGG |
| | | CAAGTGATAA (SEQ ID NO: 1191) |
| | CH1-Hinge-CH2-CH3 | GCCTCCACAAAGGGCCCTAGCGTGTTCCCTCTGGCTCCTAGCAGCAAGT |
| | (LS) (G1m3) | CTACAAGCGGAGGAACAGCTGCCCTGGGCTGCCTGGTCAAGGATTACT |
| | | TTCCTGAGCCTGTGACCGTGTCTTGGAACTCTGGCGCTCTGACAAGCGG |
| | | CGTGCACACATTTCCAGCCGTGCTGCAAAGCAGCGGCCTGTACTCTCTG |
| | | AGCAGCGTGGTCACAGTGCCAAGCTCTAGCCTGGGCACCCAGACCTACA |
| | | TCTGCAATGTGAACCACAAGCCTAGCAACACCAAGGTGGACAAGAGAGT |
| | | GGAACCCAAGAGCTGCGACAAGACCCACACCTGTCCTCCATGTCCTGCT |
| | | CCAGAACTGCTCGGCGGACCTTCCGTGTTCCTGTTTCCTCCAAA |
| | | GCCTAAGGACACCCTGATGATCAGCAGAACCCCTGAAGTGACCT |
| | | GCGTGGTGGTGGATGTGTCTCACGAGGACCCAGAAGTGAAGTT |
| | | CAATTGGTACGTGGACGGCGTGGAAGTGCACAACGCCAAGACC |
| | | AAGCCTAGAGAGGAACAGTACAACAGCACCTACAGAGTGGTGTC |
| | | CGTGCTGACAGTGCTGCACCAGGATTGGCTGAACGGCAAAGAG |
| | | TACAAGTGCAAGGTGTCCAACAAGGCCCTGCCTGCTCCTATCGA |
| | | GAAAACCATCAGCAAGGCCAAGGGCCAGCCTAGGGAACCCCAGGTT |
| | | TACACACTGCCTCCAAGCCGCGAGGAAATGACCAAGAACCAGGTGTCCC |
| | | TGACCTGCCTCGTGAAGGGCTTCTACCCTTCCGATATCGCCGTGGAATG |
| | | GGAGAGCAATGGCCAGCCTGAGAACAACTACAAGACAACCCCTCCTGTG |
| | | CTGGACAGCGACGGCTCATTCTTCCTGTACAGCAAGCTGACCGTGGACA |
| | | AGTCCAGATGGCAGCAGGGCAACGTGTTCAGCTGTAGCGTGCTGCACG |
| | | AAGCCCTGCACAGCCACTACACCCAGAAAAGCCTGTCTCTGAGCCCCGG |
| | | CAAATGATAA (SEQ ID NO: 1192) |
| | CH1-Hinge-CH2-CH3 | GCCTCTACAAAGGGCCCCAGCGTGTTCCCACTGGCTCCTAGCAGCAAGT |
| | (cak-LS) (G1m3) | CTACAAGCGGAGGAACAGCTGCCCTGGGCTGCCTGGTCAAGGATTACT |
| | | TTCCTGAGCCTGTGACCGTGTCTTGGAACTCTGGCGCTCTGACAAGCGG |
| | | CGTGCACACATTTCCAGCCGTGCTGCAAAGCAGCGGCCTGTACTCTCTG |
| | | AGCAGCGTGGTCACAGTGCCAAGCTCTAGCCTGGGCACCCAGACCTACA |
| | | TCTGCAATGTGAACCACAAGCCTAGCAACACCAAGGTGGACAAGAGAGT |
| | | GGAACCCAAGAGCTGCGACAAGACCCACACCTGTCCTCCATGTCCTGCT |
| | | CCAGAACTGCTCGGCGGACCTTCCGTGTTCCTGTTTCCTCCAAA |
| | | GCCTAAGGACACCCTGATGATCAGCAGAACCCCTGAAGTGACCT |
| | | GCGTGGTGGTGGATGTGTCTCACGAGGACCCAGAAGTGAAGTT |
| | | CAATTGGTACGTGGACGGCGTGGAAGTGCACAACGCCAAGACC |
| | | AAGCCTAGAGAGGAACAGTACAACAGCACCTACAGAGTGGTGTC |
| | | CGTGCTGACAGTGCTGCACCAGGATTGGCTGAACGGCAAAGAG |
| | | TACAAGTGCAAGGTGTCCAACAAGGCCCTGCCTGCTCCTATCGA |
| | | GAAAACCATCAGCAAGGCCAAGGGCCAGCCTAGGGAACCCCAGGTT |
| | | TACACCCTGCCTCCATGCCGCGAGGAAATGACCAAGAACCAGGTGTCCC |
| | | TGTGGTGCCTCGTGAAGGGCTTCTACCCTTCCGATATCGCCGTGGAATG |
| | | GGAGAGCAATGGCCAGCCTGAGAACAACTACAAGACAACCCCTCCTGTG |
| | | CTGGACAGCGACGGCTCATTCTTCCTGTACAGCAAGCTGACCGTGGACA |
| | | AGTCCAGATGGCAGCAGGGCAACGTGTTCAGCTGTAGCGTGCTGCACG |
| | | AAGCCCTGCACAGCCACTACACCCAGAAAAGCCTGTCTCTGAGCCCCGG |
| | | CAAGTGATAA (SEQ ID NO: 1193) |
| | CH1-Hinge-CH2 | GCCTCCACAAAGGGCCCTAGCGTGTTCCCACTGGCTCCTAGCAGCAAGT |
| | (GAALIE)-CH3 (LS) | CTACAAGCGGAGGAACAGCCGCTCTGGGCTGCCTGGTCAAGGATTACT |
| | (G1m3) | TTCCCGAGCCTGTGACCGTGTCCTGGAATTCTGGCGCTCTGACAAGCGG |
| | | CGTGCACACCTTTCCAGCTGTGCTGCAAAGCAGCGGCCTGTACTCTCTG |
| | | AGCAGCGTGGTCACAGTGCCAAGCTCTAGCCTGGGCACCCAGACCTACA |
| | | TCTGCAATGTGAACCACAAGCCTAGCAACACCAAGGTGGACAAGAGAGT |
| | | GGAACCCAAGAGCTGCGACAAGACCCACACCTGTCCTCCATGTCCTGCT |
| | | CCAGAACTGCTGGCCGGACCTTCCGTGTTCCTGTTTCCTCCAAA |
| | | GCCTAAGGACACCCTGATGATCAGCAGAACCCCTGAAGTGACCT |
| | | GCGTGGTGGTGGATGTGTCTCACGAGGACCCTGAAGTGAAGTTC |
| | | AATTGGTACGTGGACGGCGTGGAAGTGCACAACGCCAAGACCA |
| | | AGCCTAGAGAGGAACAGTACAACAGCACCTACAGAGTGGTGTCC |
| | | GTGCTGACCGTGCTGCACCAGGATTGGCTGAACGGCAAAGAGT |
| | | ACAAGTGCAAGGTGTCCAACAAGGCCCTGCCTCTGCCTGAGGAA |
| | | AAGACCATCAGCAAGGCCAAGGGCCAGCCTAGGGAACCCCAGGTTT |
| | | ACACACTGCCTCCAAGCCGCGAGGAAATGACCAAGAACCAGGTGTCCCT |
| | | GACCTGCCTCGTGAAGGGCTTCTACCCTTCCGATATCGCCGTGGAATGG |
| | | GAGAGCAATGGCCAGCCTGAGAACAACTACAAGACAACCCCTCCTGTGC |
| | | TGGACAGCGACGGCTCATTCTTCCTGTACAGCAAGCTGACCGTGGACAA |
| | | GTCCAGATGGCAGCAGGGCAACGTGTTCAGCTGTAGCGTGCTGCACGA |
| | | AGCCCTGCACAGCCACTACACCCAGAAAAGCCTGTCTCTGAGCCCCGGC |
| | | AAATGATAA (SEQ ID NO: 1194) |
| | κ-CL | CGTACGGTGGCCGCTCCTAGCGTGTTCATCTTTCCACCTAGCGACGAGC |
| | | AGCTGAAGTCTGGCACAGCCTCTGTCGTGTGCCTGCTCAACAACTTCTA |
| | | CCCCAGAGAAGCCAAGGTGCAGTGGAAGGTGGACAACGCCCTGCAGAG |
| | | CGGCAATAGCCAAGAGAGCGTGACCGAGCAGGACAGCAAGGACTCTAC |
| | | CTACAGCCTGAGCAGCACACTGACCCTGAGCAAGGCCGACTACGAGAAG |
| | | CACAAAGTGTACGCCTGCGAAGTGACCCACCAGGGCCTTTCTAGCCCTG |
| | | TGACCAAGAGCTTCAACCGGGGCGAGTGCTGATAA (SEQ ID NO: 151) |
| | husec2 | ATGGATTGGATTTGGAGAATCCTGTTCCTCGTGGGCGCCGCTACCGGA |
| | | GCCCACTCC (SEQ ID NO: 3) |
| | husec2 v3 | ATGGACTGGATCTGGCGCATCCTGTTTCTTGTGGGAGCCGCCACAGGC |
| | | GCCCATTCT (SEQ ID NO: 7) |
| | 5′UTR (cap proximal | AGAATAAACTAGTATTCTTCTGGTCCCCACAGACTCAGAGAGAACCCGC |
| | sequence + human | CACC (SEQ ID NO: 11) |
| | alpha-Globin + | |
| | Kozak) | |
| | 3′UTR (FI-Element | CTGGTACTGCATGCACGCAATGCTAGCTGCCCCTTTCCCGTCCT |
| | + polyA30LA70) | GGGTACCCCGAGTCTCCCCCGACCTCGGGTCCCAGGTATGCTCC |
| | | CACCTCCACCTGCCCCACTCACCACCTCTGCTAGTTCCAGACACC |
| | | TCCCAAGCACGCAGCAATGCAGCTCAAAACGCTTAGCCTAGCCA |
| | | CACCCCCACGGGAAACAGCAGTGATTAACCTTTAGCAATAAACG |
| | | AAAGTTTAACTAAGCTATACTAACCCCAGGGTTGGTCAATTTCGT |
| | | GCCAGCCACACCCTCGAGCTAGCAAAAAAAAAAAAAAAAAAAAAAAAA |
| | | AAAAAGCATATGACTAAAAAAAAAAAAAAAAAAAAAAAAAAAAAAAAAAA |
| | | AAAAAAAAAAAAAAAAAAAAAAAAAAAAAAAAAAA (SEQ ID NO: 1195) |
| | 3′UTR | CTGGTACTGCATGCACGCAATGCTAGCTGCCCCTTTCCCGTCCTGGGTA |
| | | CCCCGAGTCTCCCCCGACCTCGGGTCCCAGGTATGCTCCCACCTCCACC |
| | | TGCCCCACTCACCACCTCTGCTAGTTCCAGACACCTCCCAAGCACGCAG |
| | | CAATGCAGCTCAAAACGCTTAGCCTAGCCACACCCCCACGGGAAACAGC |
| | | AGTGATTAACCTTTAGCAATAAACGAAAGTTTAACTAAGCTATACTAACC |
| | | CCAGGGTTGGTCAATTTCGTGCCAGCCACACC (SEQ ID NO: 15) |
| | polyA30LA70 | AAAAAAAAAAAAAAAAAAAAAAAAAAAAAAGCATATGACTAAAAAAAAAA |
| | | AAAAAAAAAAAAAAAAAAAAAAAAAAAAAAAAAAAAAAAAAAAAAAAAAA |
| | | AAAAAAAAAA (SEQ ID NO: 17) |
| PGDM1400 | VH | CAGGTGCATCTGACGCAGTCTGGGCCTGAGGTGAGGAAGCCTGGGACC |
| | | TCCGTAAAGGTCTCCTGCAAGGCCCCTGGAAACACATTGAAGACTTATG |
| | | ATCTACACTGGGTGCGCAGCGTCCCTGGACAAGGCCTTCAGTGGATGG |
| | | GATGGATAAGCCATGAGGGCGACAAGAAGGTCATTGTGGAAAGATTCA |
| | | AGGCCAAAGTCACCATTGATTGGGACAGGTCCACCAATACGGCCTATCT |
| | | CCAACTGAGCGGCCTCACATCTGGCGACACGGCCGTCTATTATTGTGCG |
| | | AAAGGCTCAAAACACAGGCTGCGAGATTACGCTCTCTACGACGACGACG |
| | | GCGCATTGAATTGGGCTGTCGATGTTGACTACCTTTCGAACTTGGAATT |
| | | CTGGGGCCAAGGGACCGCCGTCACCGTCTCTTCA |
| | | (SEQ ID NO: 38) |
| | VH v3 | CAAGTTCATCTGACACAGAGCGGCCCTGAAGTGCGGAAGCCTGGCACAA |
| | | GCGTGAAGGTGTCCTGTAAAGCCCCTGGCAACACCCTGAAAACCTACGA |
| | | CCTGCACTGGGTCCGATCTGTGCCTGGACAAGGACTGCAGTGGATGGG |
| | | CTGGATTAGCCACGAGGGCGACAAGAAAGTGATCGTGGAACGGTTCAA |
| | | GGCCAAAGTGACCATCGACTGGGACAGAAGCACCAACACCGCCTACCTG |
| | | CAGCTGAGCGGACTGACATCTGGCGATACCGCCGTGTACTACTGTGCCA |
| | | AGGGCAGCAAGCACCGGCTGAGAGATTACGCCCTGTACGACGATGACG |
| | | GCGCCCTGAATTGGGCCGTCGATGTGGACTACCTGAGCAACCTGGAATT |
| | | CTGGGGCCAGGGAACAGCCGTGACAGTGTCTAGC (SEQ ID NO: 42) |
| | VL | GATTTTGTCCTGACTCAGTCTCCACACTCTCTGTCCGTCACCCCTGGAG |
| | | AGTCGGCCTCCATCTCCTGCAAGTCTAGTCACAGCCTCATTCATGGTGA |
| | | TAGGAACAATTATTTGGCTTGGTACGTACAGAAGCCAGGGCGGTCTCCA |
| | | CAACTCCTGATCTATTTGGCTTCCAGTCGGGCCTCCGGGGTCCCTGACA |
| | | GGTTCAGTGGCAGTGGATCGGACAAAGATTTTACACTGAAGATCAGCAG |
| | | AGTGGAGACTGAGGATGTTGGGACGTATTACTGCATGCAAGGTCGAGA |
| | | AAGTCCCTGGACGTTCGGCCAAGGGACCAAGGTGGACATCAAA (SEQ |
| | | ID NO: 45) |

### Plasmid DNA Preparation

[1317] Plasmid DNA was prepared by selecting E. coli clones for inoculation in Luria-Bertani (LB) medium containing kanamycin. The cultures were grown overnight at 37° C. and ~150 to 200 rpm. Following cell harvest, purification was done using the QIAGEN Plasmid Plus Maxi Kit according to the manufacturer's instructions. Finally, the concentration was determined by UV spectroscopy. DNA was stored in certified RNase- and DNase-free reaction tubes.

[1318] An overview of the individual plasmids are shown in Table 13 below.

TABLE 13
Exemplary plasmids encoding PGDM1400 Immunoglobulin Chains

| | Target | | |
|---|---|---|---|
| Molecule | Site | Format | Plasmid Insert |
| PGDM1400 | V1V2Apex | IgG1 | PGDM1400-HC |
| | | | (SEQ ID NO: 1305) |
| | | | PGDM1400-LC |
| | | | (SEQ ID NO: 1311) |
| | | | PGDM1400-HC(LS) |
| | | | (SEQ ID NO: 1308) |
| | | | PGDM1400 HC(cak-LS) |
| | | | (SEQ ID NO: 1314) |

### Linearization and DNA Purification

[1319] Linearization of plasmid DNA was performed using appropriate restriction enzymes, followed by purification of the linearized DNA template using magnetic beads (DynabeadS™ MyOne™ Carboxylic Acid) according to the manufacturer's protocol. The DNA concentration was measured by UV spectroscopy.

### In Vitro Transcription

[1320] CleanCap 413 ((m7(3′OMeG)(5′)ppp(5′)(2′OMeA)pG) capped RNA was produced following the process as disclosed, e.g., in Kreiter, S. et al. Cancer Immunol. Immunother. 56, 1577-87 (2007) and WO 2021214204A1, each of which is incorporated herein by reference in its entirety. Methyl pseudo-uridine was used in the in vitro transcription reaction and incorporated into the produced RNA. Cellulose purification of the resulting RNA was performed to isolate single-stranded RNA, followed by concentration measurement by UV spectroscopy. The RNA integrity was determined by microfluidic-based electrophoresis. The resulting RNA constructs are shown in SEQ ID NOs: 850, 851, and 853 (heavy chain) and 898 (light chain).

### Example 3: Generation of Polyribonucleotides Encoding scFv-Fc PGDM1400

[1321] In this Example, polyribonucleotides encoding an PGDM1400 antibody agent was designed in silico as an scFv with different VH-to-VL orientations as well as interconnecting linkers having two different lengths (e.g., (G4S)₄ and (G4S)₅). The nucleotide sequences encoding the scFvs were cloned with a nucleotide sequence encoding an Fc domain to produce Fc-fusion constructs, which encode an antibody agent referred to as an “scFv-Fc” (illustrated in, e.g., FIG. 4, Panel C). The Fc-fusion constructs were cloned into the JR81 vector. Cloning of additional scFv-Fc variants with and without an “LS” mutation was performed. Lead candidates were further optimized by introducing one of two different sequences encoding linkers (e.g., a (G4S)4 or (G4S)5 linker) between the scFv and Fc domain.

[1322] Objectives of the present Example include:
[1323] (1) Cloning scFv-Fc PGDM1400 L/S-encoding DNA into JR81 plasmid; and
[1324] (2) Verification of selected clones by control digestion and sequencing.

### Codon Optimization and Cloning Strategy

[1325] Codon optimization and cloning were performed as described above in Example 2. The nucleotide sequence of the resulting scFv-Fc chain-encoding plasmid constructs as well as the sequence of the backbone can be found in SEQ ID NOs: 1341, 1344, 1347 and 1350. Such sequences encode scFv-Fc chain amino acid sequences shown in SEQ ID NOs: 1343, 1346, 1349, and 1352.

[1326] Exemplary sequences used in the cloning methods above are shown in Table 14 below.

TABLE 14
Exemplary sequences used in scFv-Fc PGDM1400 encoding polyribonucleotides.

| Feature | Fragment | Nucleotide Sequence |
|---|---|---|
| General | Hinge (C/S)-CH2- | GAACCTAAGAGCAGCGACAAGACCCACACCTGTCCTCCATGTCCTGCTC |
| | CH3 (LS) (G1m3) | CAGAACTGCTCGGCGGACCTTCCGTGTTCCTGTTTCCTCCAAAGCCTAA |
| | | GGACACCCTGATGATCAGCAGAACCCCTGAAGTGACCTGCGTGGTGGTG |
| | | GATGTGTCTCACGAGGACCCCGAAGTGAAGTTCAATTGGTACGTGGACG |
| | | GCGTGGAAGTGCACAACGCCAAGACCAAGCCTAGAGAGGAACAGTACAA |
| | | CAGCACCTACAGAGTGGTGTCCGTGCTGACAGTGCTGCACCAGGATTGG |
| | | CTGAACGGCAAAGAGTACAAGTGCAAGGTGTCCAACAAGGCCCTGCCTG |
| | | CTCCTATCGAGAAAACCATCAGCAAGGCCAAGGGCCAGCCTAGGGAACC |
| | | CCAGGTTTACACACTGCCTCCAAGCCGCGAGGAAATGACCAAGAACCAG |
| | | GTGTCCCTGACCTGCCTCGTGAAGGGCTTCTACCCTTCCGATATCGCCG |
| | | TGGAATGGGAGAGCAATGGCCAGCCTGAGAACAACTACAAGACAACCCC |
| | | TCCTGTGCTGGACAGCGACGGCTCATTCTTCCTGTACAGCAAGCTGACC |
| | | GTGGACAAGTCCAGATGGCAGCAGGGCAACGTGTTCAGCTGTAGCGTG |
| | | CTGCACGAAGCCCTGCACAGCCACTACACCCAGAAAAGCCTGTCTCTGA |
| | | GCCCCGGCAAATGATAA (SEQ ID NO: 1196) |
| | husec2 v2 | ATGGATTGGATCTGGCGCATCCTGTTTCTCGTGGGAGCTGCCACAGGCG |
| | | CCCACTCT (SEQ ID NO: 5) |
| | husec2 v4 | ATGGATTGGATCTGGCGCATCCTGTTTCTCGTGGGAGCTGCCACAGGCG |
| | | CCCACAGC (SEQ ID NO: 9) |
| | 5′UTR (cap proximal | AGAATAAACTAGTATTCTTCTGGTCCCCACAGACTCAGAGAGAACCCGC |
| | sequence + human | CACC (SEQ ID NO: 11) |
| | alpha-Globin + | |
| | Kozak) | |
| | 3′UTR (FI-Element | CTGGTACTGCATGCACGCAATGCTAGCTGCCCCTTTCCCGTCCTG |
| | + polyA30LA70) | GGTACCCCGAGTCTCCCCCGACCTCGGGTCCCAGGTATGCTCCC |
| | | ACCTCCACCTGCCCCACTCACCACCTCTGCTAGTTCCAGACACCT |
| | | CCCAAGCACGCAGCAATGCAGCTCAAAACGCTTAGCCTAGCCAC |
| | | ACCCCCACGGGAAACAGCAGTGATTAACCTTTAGCAATAAACGA |
| | | AAGTTTAACTAAGCTATACTAACCCCAGGGTTGGTCAATTTCGTG |
| | | CCAGCCACACCCTCGAGCTAGCAAAAAAAAAAAAAAAAAAAAAAAAAAA |
| | | AAAGCATATGACTAAAAAAAAAAAAAAAAAAAAAAAAAAAAAAAAAAAAA |
| | | AAAAAAAAAAAAAAAAAAAAAAAAAAAAAAAAA (SEQ ID NO: 1195) |
| | Linker LL4 v1 | GGTGGCGGAGGAAGCGGAGGCGGAGGTTCAGGCGGCGGAGGCTCTGG |
| | | CGGTGGTGGATCT (SEQ ID NO: 50) |
| | Linker LL4 v2 | GGTGGCGGTGGTTCTGGCGGAGGCGGAAGTGGCGGCGGTGGGTCCGG |
| | | AGGTGGTGGATCT(SEQ ID NO: 52) |
| | Linker LL4 v3 | GGCGGAGGTGGAAGTGGTGGCGGCGGATCTGGCGGCGGTGGGTCCGG |
| | | AGGTGGTGGATCT(SEQ ID NO: 54) |
| | Linker LL4 v4 | GGCGGAGGTGGAAGTGGTGGTGGCGGTAGCGGAGGCGGTGGGTCCGG |
| | | AGGTGGTGGATCT(SEQ ID NO:56) |
| | Linker LL4 v5 | GGCGGCGGAGGAAGCGGAGGCGGAGGTTCTGGTGGCGGAGGCTCAGG |
| | | CGGTGGCGGATCT(SEQ ID NO: 58) |
| | Linker LL5 v1 | GGCGGCGGAGGAAGCGGAGGCGGAGGTTCTGGTGGTGGTGGCTCTGG |
| | | TGGCGGAGGCTCAGGCGGTGGCGGATCT (SEQ ID NO: 61) |
| | Linker LL5 v2 | GGCGGCGGAGGAAGCGGAGGGGGAGGCTCTGGAGGTGGTGGCTCTGG |
| | | TGGCGGAGGCTCAGGCGGTGGCGGATCT(SEQ ID NO: 63) |
| PGDM1400 | VH_LL4_VL_LL4 | CAAGTTCACCTGACACAGTCTGGCCCCGAAGTGCGGAAGCCTGGCACAA |
| | | GCGTGAAGGTGTCCTGTAAAGCCCCTGGCAACACCCTGAAAACCTACGA |
| | | CCTGCACTGGGTCCGATCTGTGCCTGGACAAGGACTGCAGTGGATGGG |
| | | CTGGATTAGCCACGAGGGCGACAAGAAAGTGATCGTGGAACGGTTCAA |
| | | GGCCAAAGTGACCATCGACTGGGACAGAAGCACCAACACCGCCTACCTG |
| | | CAGCTGAGCGGACTGACATCTGGCGATACCGCCGTGTACTACTGTGCCA |
| | | AGGGCAGCAAGCACCGGCTGAGAGATTACGCCCTGTACGACGATGACG |
| | | GCGCCCTGAATTGGGCCGTCGATGTGGACTACCTGAGCAACCTGGAATT |
| | | CTGGGGCCAGGGAACAGCCGTGACAGTGTCTTCCGGTGGCGGAGGAAG |
| | | CGGAGGCGGAGGTTCAGGCGGCGGAGGCTCTGGCGGTGGTGGATCTGA |
| | | TTTTGTGCTGACACAGAGCCCTCACAGCCTGAGCGTTACACCTGGCGAG |
| | | AGCGCCAGCATCAGCTGCAAGTCTAGCCACTCTCTGATCCACGGCGACC |
| | | GGAACAACTACCTGGCTTGGTACGTGCAGAAGCCCGGCAGATCTCCTCA |
| | | GCTGCTGATCTACCTGGCCAGCAGCAGAGCTAGCGGCGTGCCAGATAGA |
| | | TTTTCTGGCAGCGGCAGCGACAAGGATTTCACCCTGAAGATCTCCAGAG |
| | | TGGAAACCGAGGACGTGGGCACCTACTACTGTATGCAGGGCAGAGAGA |
| | | GCCCCTGGACATTTGGCCAGGGCACCAAGGTGGACATCAAAGGTGGCG |
| | | GTGGTTCTGGCGGAGGCGGAAGTGGCGGCGGTGGGTCCGGAGGTGGT |
| | | GGATCT (SEQ ID NO: 66) |
| | VL_LL4_VH_LL4 | GATTTTGTGCTGACACAGTCTCCCCACAGCCTGAGCGTTACACCTGGCG |
| | | AGTCTGCCAGCATCAGCTGCAAGTCTAGCCACTCTCTGATCCACGGCGA |
| | | CCGGAACAACTACCTGGCTTGGTACGTGCAGAAGCCCGGCAGATCTCCT |
| | | CAGCTGCTGATCTACCTGGCCAGCAGCAGAGCTTCTGGCGTGCCCGATA |
| | | GATTTTCTGGCAGCGGCAGCGACAAGGACTTCACCCTGAAGATCTCCAG |
| | | AGTGGAAACCGAGGACGTGGGCACCTACTACTGTATGCAGGGCAGAGA |
| | | GAGCCCCTGGACATTTGGCCAGGGCACCAAGGTGGACATCAAAGGCGG |
| | | CGGAGGAAGCGGAGGCGGAGGTTCTGGTGGCGGAGGCTCAGGCGGTG |
| | | GCGGATCTCAAGTTCATCTGACACAGAGCGGCCCTGAAGTGCGGAAGCC |
| | | TGGCACAAGCGTGAAGGTGTCCTGTAAAGCCCCTGGCAACACCCTGAAA |
| | | ACCTACGACCTGCACTGGGTCCGATCTGTGCCTGGACAGGGACTGCAAT |
| | | GGATGGGCTGGATTAGCCACGAGGGCGACAAGAAAGTGATCGTGGAAC |
| | | GGTTCAAGGCCAAAGTGACCATCGACTGGGACAGAAGCACCAACACCGC |
| | | CTACCTGCAGCTGAGCGGACTGACATCTGGCGATACCGCCGTGTACTAC |
| | | TGTGCCAAGGGCAGCAAGCACCGGCTGAGAGATTACGCCCTGTACGACG |
| | | ATGACGGCGCCCTGAATTGGGCCGTCGATGTGGACTACCTGAGCAACCT |
| | | GGAATTCTGGGGCCAGGGAACAGCCGTGACAGTGTCTTCCGGCGGAGG |
| | | TGGAAGTGGTGGTGGCGGTAGCGGAGGCGGTGGGTCCGGAGGTGGTG |
| | | GATCT (SEQ ID NO: 69) |
| | VH_LL5_VL_LL4 | CAAGTTCACCTGACACAGTCTGGCCCCGAAGTGCGGAAGCCTGGCACAA |
| | | GCGTGAAGGTGTCCTGTAAAGCCCCTGGCAACACCCTGAAAACCTACGA |
| | | CCTGCACTGGGTCCGATCTGTGCCTGGACAAGGACTGCAGTGGATGGG |
| | | CTGGATTAGCCACGAGGGCGACAAGAAAGTGATCGTGGAACGGTTCAA |
| | | GGCCAAAGTGACCATCGACTGGGACAGAAGCACCAACACCGCCTACCTG |
| | | CAGCTGAGCGGACTGACATCTGGCGATACCGCCGTGTACTACTGTGCCA |
| | | AGGGCAGCAAGCACCGGCTGAGAGATTACGCCCTGTACGACGATGACG |
| | | GCGCCCTGAATTGGGCCGTCGATGTGGACTACCTGAGCAACCTGGAATT |
| | | CTGGGGCCAGGGAACAGCCGTGACAGTGTCTTCCGGGGGGGGAGGAAG |
| | | CGGAGGGGGAGGCTCTGGAGGTGGTGGCTCTGGTGGCGGAGGCTCAG |
| | | GCGGTGGCGGATCTGATTTTGTGCTGACACAGAGCCCTCACAGCCTGAG |
| | | CGTTACACCTGGCGAGAGCGCCAGCATCAGCTGCAAGTCTAGCCACTCT |
| | | CTGATCCACGGCGACCGGAACAACTACCTGGCTTGGTACGTGCAGAAGC |
| | | CCGGCAGATCTCCTCAGCTGCTGATCTACCTGGCCAGCAGCAGAGCTAG |
| | | CGGCGTGCCAGATAGATTTTCTGGCAGCGGCAGCGACAAGGATTTCACC |
| | | CTGAAGATCTCCAGAGTGGAAACCGAGGACGTGGGCACCTACTACTGTA |
| | | TGCAGGGCAGAGAGAGCCCCTGGACATTTGGCCAGGGCACCAAGGTGG |
| | | ACATCAAAGGCGGAGGTGGAAGTGGTGGTGGCGGTAGCGGAGGCGGTG |
| | | GGTCCGGAGGTGGTGGATCT (SEQ ID NO: 72) |
| | VL_LL5_VH_LL4 | GATTTTGTGCTGACACAGTCTCCCCACAGCCTGAGCGTTACACCTGGCG |
| | | AGTCTGCCAGCATCAGCTGCAAGTCTAGCCACTCTCTGATCCACGGCGA |
| | | CCGGAACAACTACCTGGCTTGGTACGTGCAGAAGCCCGGCAGATCTCCT |
| | | CAGCTGCTGATCTACCTGGCCAGCAGCAGAGCTTCTGGCGTGCCCGATA |
| | | GATTTTCTGGCAGCGGCAGCGACAAGGACTTCACCCTGAAGATCTCCAG |
| | | AGTGGAAACCGAGGACGTGGGCACCTACTACTGTATGCAGGGCAGAGA |
| | | GAGCCCCTGGACATTTGGCCAGGGCACCAAGGTGGACATCAAAGGCGG |
| | | CGGAGGAAGCGGAGGCGGAGGTTCTGGTGGTGGTGGCTCTGGTGGCG |
| | | GAGGCTCAGGCGGTGGCGGATCTCAAGTTCATCTGACACAGAGCGGCC |
| | | CTGAAGTGCGGAAGCCTGGCACAAGCGTGAAGGTGTCCTGTAAAGCCCC |
| | | TGGCAACACCCTGAAAACCTACGACCTGCACTGGGTCCGATCTGTGCCT |
| | | GGACAGGGACTGCAATGGATGGGCTGGATTAGCCACGAGGGCGACAAG |
| | | AAAGTGATCGTGGAACGGTTCAAGGCCAAAGTGACCATCGACTGGGACA |
| | | GAAGCACCAACACCGCCTACCTGCAGCTGAGCGGACTGACATCTGGCGA |
| | | TACCGCCGTGTACTACTGTGCCAAGGGCAGCAAGCACCGGCTGAGAGAT |
| | | TACGCCCTGTACGACGATGACGGCGCCCTGAATTGGGCCGTCGATGTGG |
| | | ACTACCTGAGCAACCTGGAATTCTGGGGCCAGGGAACAGCCGTGACAGT |
| | | GTCTTCCGGCGGAGGTGGAAGTGGTGGCGGCGGATCTGGCGGCGGTG |
| | | GGTCCGGAGGTGGTGGATCT (SEQ ID NO: 75) |

### Plasmid DNA Preparation

[1327] Plasmid DNA was prepared by selecting 1. c40clones for inoculation in Luria-Bertani (LB) medium containing kanamycin. The cultures were grown overnight at 37° C. and −150 to 200 rpm. Following cell harvest, purification was done using the QIAGEN Plasmid Plus Maxi Kit according to the manufacturer's instructions. Finally, the concentration was determined by UV spectroscopy. DNA was stored in certified RNase- and DNase-free reaction tubes.

[1328] An overview of the individual plasmids are shown in Table 15 below.

TABLE 15
Exemplary plasmids encoding scFv-Fc PGDM1400 chains

| | Target | | |
|---|---|---|---|
| Molecule | site | Format | Plasmid Insert |
| PGDM1400 | V1V2Apex | scFv-Fc | scFv-PGDM1400 (VH-LL4-VL)- |
| | | | Fc(LS) (SEQ ID NO: 1341) |
| | | | scFv- PGDM1400 (VH-LL5-VL)- |
| | | | Fc(LS) (SEQ ID NO: 1344) |
| | | | scFv- PGDM1400 (VL-LL4-VH)- |
| | | | Fc(LS) (SEQ ID NO: 1347) |
| | | | scFv- PGDM1400 (VL-LL5-VH)- |
| | | | Fc(LS) (SEQ ID NO: 1350) |

### Linearization and DNA Purification

[1329] Linearization of plasmid DNA was performed using appropriate restriction enzymes, followed by purification of the linearized DNA template using magnetic beads (Dynabeads™ MyOne™ Carboxylic Acid) according to the manufacturer's protocol. The DNA concentration was measured by UV spectroscopy.

### In Vitro Transcription

[1330] CleanCap 413 (m7(3′OMeG)(5′)ppp(5′)(2′OMeA)pG) capped RNA was produced following the process as disclosed, e.g., in WO 2021214204A1, which is incorporated herein by reference in its entirety. Methyl pseudo-uridine was used in the in vitro transcription reaction and incorporated into the produced RNA. Cellulose purification of the resulting RNA was performed to isolate single-stranded RNA, followed by concentration measurement by UV spectroscopy. The RNA integrity was determined by microfluidic-based electrophoresis. The resulting RNA constructs are shown in SEQ ID NOs: 1000, 1048, 1096, and 929.

### Example 4: Generation of Polyribonucleotides Encoding PGDM1400 Monospecific CrossMab^{CH1-CLx} and PGDM1400 Monospecific CrossMab^{CH1-CLcv}

[1331] In this Example, polyribonucleotides encoding PGDM1400 in CrossMab^{CH1-CLx} format (as illustrated e.g., in FIG. 4, Panel B) were generated. In CrossMab^{CH1-CLx} format, a CH₁ domain is fused to a VL and a CL domain is fused in between a VH and a CH₂-CH₃ set of domains. By introducing these domain swaps, the resulting CrossMab^{CH1-CLx} chains will specifically pair, while strongly inhibiting binding to wild-type or unmodified immunoglobulin chains. Thus, with this format, non-functional mispairings are strongly reduced.

[1332] Polyribonucleotides encoding PGDM1400 in CrossMab^{CH1-CLcv} format (as illustrated e.g., in FIG. 4, Panel D) were generated. In CrossMab^{CH1-CLcv} format, a VL is operably linked to a CL domain and a VH is operably linked to a CH₁-CH₂-CH₃ set of domains. To minimize incorrect chain pairing, the CL domain of the immunoglobulin light chain and the CH₁ domain of the immunoglobulin heavy chain are modified to include charge variants, which promote pairing of a constant domain with a positive charge to a constant domain with a negative charge.

[1333] Polyribonucleotides encoding the CrossMab^{CH1-CLx} and CrossMab^{CH1-CLcv} formats were cloned into the JR81 vector.

[1334] Objectives of the present Example include:
[1335] (1) Clone PGDM1400 CrossMab^{CH1-CLx}-encoding DNA Fragment Strings into JR81 backbone; and
[1336] (2) Clone PGDM1400 CrossMab^{CH1/CLcv}-encoding DNA Fragment Strings into JR81 backbone.

[1337] The methods of the present example include: (1) cloning of DNA fragments into appropriate RNA-expression vector; and (2) verification of selected clones by control digestion and sequencing.

### Codon Optimization and Cloning Strategy

[1338] Codon optimization and cloning were performed as described above in Example 2. The nucleotide sequence of the resulting heavy chain- and light chain-encoding plasmid constructs as well as the sequence of the backbone can be found in SEQ ID NOs: 1317, 1323, 1329, 1332, 1335, and 1338 (heavy chain) and SEQ ID NO: 1320 and 1326 (light chain). Such sequences encode heavy chain amino acid sequences shown in SEQ ID NOs: 1319, 1325, 1331, 1334, 1337, and 1340 and encode light chain amino acid sequence shown in SEQ ID NO: 1322 and 1328.

[1339] Exemplary sequences used in the cloning methods for PGDM1400 CrossMab^{CH1-CLx}-encoding DNA Fragment Strings are shown in Table 16 below.

TABLE 16
Exemplary sequences used in PGDM1400 CrossMab^{CH1-CLx} encoding polyribonucleotides.

| Feature | Fragment | Nucleotide Sequence |
|---|---|---|
| General | Hinge (ΔEPKSC)-CH2-CH3 | GATAAGACCCACACCTGTCCTCCATGTCCAGCTCCAGAACTGCTC |
| | (LS) (G1m3) | GGCGGACCTTCCGTGTTCCTGTTTCCTCCAAAGCCTAAGGACACC |
| | | CTGATGATCAGCAGAACCCCTGAAGTGACCTGCGTGGTGGTGGAT |
| | | GTGTCTCACGAGGACCCCGAAGTGAAGTTCAATTGGTACGTGGAC |
| | | GGCGTGGAAGTGCACAACGCCAAGACCAAGCCTAGAGAGGAACA |
| | | GTACAACAGCACCTACAGAGTGGTGTCCGTGCTGACAGTGCTGCA |
| | | CCAGGATTGGCTGAACGGCAAAGAGTACAAGTGCAAGGTGTCCAA |
| | | CAAGGCCCTGCCTGCTCCTATCGAGAAAACCATCAGCAAGGCCAA |
| | | GGGCCAGCCTAGGGAACCCCAGGTTTACACACTGCCTCCAAGCCG |
| | | CGAGGAAATGACCAAGAACCAGGTGTCCCTGACCTGCCTCGTGAA |
| | | GGGCTTCTACCCTTCCGATATCGCCGTGGAATGGGAGAGCAATGG |
| | | CCAGCCTGAGAACAACTACAAGACAACCCCTCCTGTGCTGGACAG |
| | | CGACGGCTCATTCTTCCTGTACAGCAAGCTGACCGTGGACAAGTC |
| | | CAGATGGCAGCAGGGCAACGTGTTCAGCTGTAGCGTGCTGCACG |
| | | AAGCCCTGCACAGCCACTACACCCAGAAAAGCCTGTCTCTGAGCC |
| | | CCGGCAAATGATAA |
| | | (SEQ ID NO: 1197) |
| | Hinge (ΔEPKSC)-CH2-CH3 | GATAAGACCCACACCTGTCCTCCATGTCCAGCTCCAGAACTGCTC |
| | (cah-LS) (G1m3) | GGCGGACCTTCCGTGTTCCTGTTTCCTCCAAAGCCTAAGGACACC |
| | | CTGATGATCAGCAGAACCCCTGAAGTGACCTGCGTGGTGGTGGAT |
| | | GTGTCTCACGAGGACCCCGAAGTGAAGTTCAATTGGTACGTGGAC |
| | | GGCGTGGAAGTGCACAACGCCAAGACCAAGCCTAGAGAGGAACA |
| | | GTACAACAGCACCTACAGAGTGGTGTCCGTGCTGACAGTGCTGCA |
| | | CCAGGATTGGCTGAACGGCAAAGAGTACAAGTGCAAGGTGTCCAA |
| | | CAAGGCCCTGCCTGCTCCTATCGAGAAAACCATCAGCAAGGCCAA |
| | | GGGCCAGCCTAGGGAACCCCAAGTCTGTACACTGCCTCCTAGCCG |
| | | CGAGGAAATGACCAAGAACCAGGTGTCCCTGAGCTGCGCCGTGAA |
| | | GGGCTTTTACCCTTCCGATATCGCCGTGGAATGGGAGAGCAATGG |
| | | CCAGCCTGAGAACAACTACAAGACAACCCCTCCTGTGCTGGACAG |
| | | CGACGGCTCATTCTTCCTGGTGTCCAAGCTGACAGTGGACAAGAG |
| | | CAGATGGCAGCAGGGCAACGTGTTCAGCTGCTCTGTGCTGCACGA |
| | | AGCCCTGCACAGCCACTACACCCAGAAGTCCCTGTCTCTGAGCCC |
| | | CGGCAAGTGATAA (SEQ ID NO: 1198) |
| | Hinge (ΔEPKSC)-CH2-CH3 | GATAAGACCCACACCTGTCCTCCATGTCCAGCTCCAGAACTGCTC |
| | (cak-LS) (G1m3) | GGCGGACCTTCCGTGTTCCTGTTTCCTCCAAAGCCTAAGGACACC |
| | | CTGATGATCAGCAGAACCCCTGAAGTGACCTGCGTGGTGGTGGAT |
| | | GTGTCTCACGAGGACCCCGAAGTGAAGTTCAATTGGTACGTGGAC |
| | | GGCGTGGAAGTGCACAACGCCAAGACCAAGCCTAGAGAGGAACA |
| | | GTACAACAGCACCTACAGAGTGGTGTCCGTGCTGACAGTGCTGCA |
| | | CCAGGATTGGCTGAACGGCAAAGAGTACAAGTGCAAGGTGTCCAA |
| | | CAAGGCCCTGCCTGCTCCTATCGAGAAAACCATCAGCAAGGCCAA |
| | | GGGCCAGCCTAGGGAACCCCAGGTTTACACCCTGCCTCCATGCCG |
| | | CGAGGAAATGACCAAGAACCAGGTGTCCCTGTGGTGCCTCGTGAA |
| | | GGGCTTCTACCCTTCCGATATCGCCGTGGAATGGGAGAGCAATGG |
| | | CCAGCCTGAGAACAACTACAAGACAACCCCTCCTGTGCTGGACAG |
| | | CGACGGCTCATTCTTCCTGTACAGCAAGCTGACCGTGGACAAGTC |
| | | CAGATGGCAGCAGGGCAACGTGTTCAGCTGTAGCGTGCTGCACG |
| | | AAGCCCTGCACAGCCACTACACCCAGAAGTCCCTGTCTCTGAGCC |
| | | CCGGCAAGTGATAA(SEQ ID NO: 1199) |
| | Hinge (ΔEPKSC)-CH2 | GATAAGACCCACACCTGTCCTCCATGTCCAGCTCCAGAACTGCTG |
| | (GAALIE)-CH3 (LS) | GCCGGACCTTCCGTGTTCCTGTTTCCTCCAAAGCCTAAGGACACC |
| | (G1m3) | CTGATGATCAGCAGAACCCCTGAAGTGACCTGCGTGGTGGTGGAT |
| | | GTGTCTCACGAGGACCCCGAAGTGAAGTTCAATTGGTACGTGGAC |
| | | GGCGTGGAAGTGCACAATGCCAAGACCAAGCCTAGAGAGGAACA |
| | | GTACAACAGCACCTACAGAGTGGTGTCCGTGCTGACCGTGCTGCA |
| | | CCAGGATTGGCTGAACGGCAAAGAGTACAAGTGCAAGGTGTCCAA |
| | | CAAGGCCCTGCCTCTGCCTGAGGAAAAGACCATCAGCAAGGCCAA |
| | | GGGCCAGCCTAGGGAACCCCAGGTTTACACACTGCCTCCAAGCCG |
| | | CGAGGAAATGACCAAGAACCAGGTGTCCCTGACCTGCCTCGTGAA |
| | | GGGCTTCTACCCTTCCGATATCGCCGTGGAATGGGAGAGCAATGG |
| | | CCAGCCTGAGAACAACTACAAGACAACCCCTCCTGTGCTGGACAG |
| | | CGACGGCTCATTCTTCCTGTACAGCAAGCTGACCGTGGACAAGTC |
| | | CAGATGGCAGCAGGGCAACGTGTTCAGCTGTAGCGTGCTGCACG |
| | | AAGCCCTGCACAGCCACTACACCCAGAAAAGCCTGTCTCTGAGCC |
| | | CCGGCAAATGATAA(SEQ ID NO: 1200) |
| | Hinge (ΔEPKSC)-CH2 | GATAAGACCCACACCTGTCCTCCATGTCCAGCTCCAGAACTGCTC |
| | (GAALIE)-CH3 (cah-LS) | GGCGGACCTTCCGTGTTCCTGTTTCCTCCAAAGCCTAAGGACACC |
| | (G1m3) | CTGATGATCAGCAGAACCCCTGAAGTGACCTGCGTGGTGGTGGAT |
| | | GTGTCTCACGAGGACCCCGAAGTGAAGTTCAATTGGTACGTGGAC |
| | | GGCGTGGAAGTGCACAACGCCAAGACCAAGCCTAGAGAGGAACA |
| | | GTACAACAGCACCTACAGAGTGGTGTCCGTGCTGACAGTGCTGCA |
| | | CCAGGATTGGCTGAACGGCAAAGAGTACAAGTGCAAGGTGTCCAA |
| | | CAAGGCCCTGCCTGCTCCTATCGAGAAAACCATCAGCAAGGCCAA |
| | | GGGCCAGCCTAGGGAACCCCAAGTCTGTACACTGCCTCCTAGCCG |
| | | CGAGGAAATGACCAAGAACCAGGTGTCCCTGAGCTGCGCCGTGAA |
| | | GGGCTTTTACCCTTCCGATATCGCCGTGGAATGGGAGAGCAATGG |
| | | CCAGCCTGAGAACAACTACAAGACAACCCCTCCTGTGCTGGACAG |
| | | CGACGGCTCATTCTTCCTGGTGTCCAAGCTGACAGTGGACAAGAG |
| | | CAGATGGCAGCAGGGCAACGTGTTCAGCTGCTCTGTGCTGCACGA |
| | | AGCCCTGCACAGCCACTACACCCAGAAGTCCCTGTCTCTGAGCCC |
| | | CGGCAAGTGATAA(SEQ ID NO: 1201) |
| | κ-CL (AS-QE) | GCATCTGTGGCCGCTCCTAGCGTGTTCATCTTCCCACCTAGCGAC |
| | | GAGGAACTGAAGTCTGGCACAGCCAGCGTCGTGTGCCTGCTGAAC |
| | | AACTTCTACCCCAGAGAAGCCAAGGTGCAGTGGAAGGTGGACAAC |
| | | GCCCTGCAGAGCGGCAATAGCCAAGAGAGCGTGACCGAGCAGGA |
| | | CAGCAAGGACTCTACCTACAGCCTGAGCAGCACCCTGACACTGAG |
| | | CAAGGCCGACTACGAGAAGCACAAAGTGTACGCCTGCGAAGTGAC |
| | | CCACCAGGGCCTTTCTAGCCCTGTGACCAAGAGCTTCAACCGGGG |
| | | CGAGTGC (SEQ ID NO: 154) |
| | CH1(SS) (G1m3) | AGCAGCGCCTCTACAAAGGGCCCCAGCGTTTTCCCACTGGCTCCT |
| | | AGCAGCAAGAGCACATCTGGCGGAACAGCCGCTCTGGGCTGTCT |
| | | GGTCAAGGACTACTTTCCCGAGCCTGTGACCGTGTCCTGGAATTC |
| | | TGGCGCTCTGACATCCGGCGTGCACACCTTTCCAGCTGTGCTGCA |
| | | AAGCAGCGGCCTGTACTCTCTGAGCAGCGTGGTCACAGTGCCAAG |
| | | CTCTAGCCTGGGCACCCAGACCTACATCTGCAATGTGAACCACAA |
| | | GCCTAGCAACACGAAGGTCGACAAGAGAGTGGAACCCAAGTCCTG |
| | | CTGATAA (SEQ ID NO: 1202) |
| | husec2 v2 | ATGGATTGGATCTGGCGCATCCTGTTTCTCGTGGGAGCTGCCACA |
| | | GGCGCCCACTCT (SEQ ID NO: 5) |
| | husec2 v4 | ATGGATTGGATCTGGCGCATCCTGTTTCTCGTGGGAGCTGCCACA |
| | | GGCGCCCACAGC (SEQ ID NO: 9) |
| | 5′UTR (cap proximal | AGAATAAACTAGTATTCTTCTGGTCCCCACAGACTCAGAGAGAAC |
| | sequence + human alpha- | CCGCCACC (SEQ ID NO: 11) |
| | Globin + Kozak) | |
| | 3′UTR (FI-Element + | CTGGTACTGCATGCACGCAATGCTAGCTGCCCCTTTCCCGT |
| | polyA30LA70) | CCTGGGTACCCCGAGTCTCCCCCGACCTCGGGTCCCAGGT |
| | | ATGCTCCCACCTCCACCTGCCCCACTCACCACCTCTGCTAG |
| | | TTCCAGACACCTCCCAAGCACGCAGCAATGCAGCTCAAAAC |
| | | GCTTAGCCTAGCCACACCCCCACGGGAAACAGCAGTGATT |
| | | AACCTTTAGCAATAAACGAAAGTTTAACTAAGCTATACTAA |
| | | CCCCAGGGTTGGTCAATTTCGTGCCAGCCACACCCTCGAGCT |
| | | AGCAAAAAAAAAAAAAAAAAAAAAAAAAAAAAAGCATATGACTAAA |
| | | AAAAAAAAAAAAAAAAAAAAAAAAAAAAAAAAAAAAAAAAAAAAAA |
| | | AAAAAAAAAAAAAAAAAAAAA (SEQ ID NO: 1195) |
| PGDM1400 | VH v2 | CAAGTTCACCTGACACAGTCTGGCCCCGAAGTGCGGAAGCCTGGC |
| | | ACAAGCGTGAAGGTGTCCTGTAAAGCCCCTGGCAACACCCTGAAA |
| | | ACCTACGACCTGCACTGGGTCCGATCTGTGCCTGGACAAGGACTG |
| | | CAGTGGATGGGCTGGATTAGCCACGAGGGCGACAAGAAAGTGAT |
| | | CGTGGAACGGTTCAAGGCCAAAGTGACCATCGACTGGGACAGAA |
| | | GCACCAACACCGCCTACCTGCAGCTGAGCGGACTGACATCTGGCG |
| | | ATACCGCCGTGTACTACTGTGCCAAGGGCAGCAAGCACCGGCTGA |
| | | GAGATTACGCCCTGTACGACGATGACGGCGCCCTGAATTGGGCCG |
| | | TCGATGTGGACTACCTGAGCAACCTGGAATTCTGGGGCCAGGGAA |
| | | CAGCCGTGACAGTGTCTAGT(SEQ ID NO: 40) |
| | VL v2 | GATTTTGTGCTGACACAGTCTCCCCACAGCCTGAGCGTTACACCT |
| | | GGCGAGTCTGCCAGCATCAGCTGCAAGTCTAGCCACTCTCTGATC |
| | | CACGGCGACCGGAACAACTACCTGGCTTGGTACGTGCAGAAGCCC |
| | | GGCAGATCTCCTCAGCTGCTGATCTACCTGGCCAGCAGCAGAGCT |
| | | AGCGGCGTGCCAGATAGATTTTCTGGCAGCGGCAGCGACAAGGA |
| | | CTTCACCCTGAAGATCTCCAGAGTGGAAACCGAGGACGTGGGCAC |
| | | CTACTACTGTATGCAGGGCAGAGAGAGCCCCTGGACATTTGGCCA |
| | | GGGCACCAAGGTGGACATCAAG(SEQ ID NO: 47) |

[1340] Exemplary sequences used in the cloning methods for PGDM1400 CrossMab^{CH1-CLcv}-encoding DNA Fragment Strings are shown in Table 17 below.

TABLE 17
Exemplary sequences used in PGDM1400 CrossMab^{CH1-CLcv} encoding polyribonucleotides.

| Feature | Fragment | Nucleotide Sequence |
|---|---|---|
| General | CH1 | GCTTCCACAAAGGGCCCTAGCGTGTTCCCTCTGGCTCCTAGCAGC |
| | (K147E + K213D)(G1m3) | AAGTCTACAAGCGGAGGAACAGCTGCCCTGGGCTGCCTGGTGGA |
| | | AGATTACTTTCCTGAGCCTGTGACCGTGTCCTGGAACAGCGGTGC |
| | | TCTGACTTCTGGCGTGCACACCTTTCCAGCCGTGCTGCAAAGCAG |
| | | CGGCCTGTACTCTCTGAGCAGCGTGGTCACAGTGCCAAGCTCTAG |
| | | CCTGGGCACCCAGACCTACATCTGCAATGTGAACCACAAGCCTAG |
| | | CAACACCAAGGTGGACGACAGAGTG(SEQ ID NO: 86) |
| | Ck (E123K + Q124R) | CGTACGGTGGCCGCTCCTAGCGTGTTCATCTTTCCACCTAGCGAC |
| | | AAGAGACTGAAGTCTGGCACAGCCTCTGTCGTGTGCCTGCTCAAC |
| | | AACTTCTACCCCAGAGAAGCCAAGGTGCAGTGGAAGGTGGACAAC |
| | | GCCCTGCAGAGCGGCAATAGCCAAGAGAGCGTGACCGAGCAGGA |
| | | CAGCAAGGACTCTACCTACAGCCTGAGCAGCACACTGACCCTGAG |
| | | CAAGGCCGACTACGAGAAGCACAAAGTGTACGCCTGCGAAGTGAC |
| | | CCACCAGGGCCTTTCTAGCCCTGTGACCAAGAGCTTCAACCGGGG |
| | | CGAGTGCTGATAA (SEQ ID NO: 157) |
| | Hinge-CH2-CH3 (LS) | GAACCCAAGAGCTGCGACAAGACCCACACCTGTCCTCCATGTCCT |
| | (G1m3) | GCTCCAGAACTGCTCGGCGGACCTTCCGTGTTCCTGTTTCCTCCA |
| | | AAGCCTAAGGACACCCTGATGATCAGCAGAACCCCTGAAGTGACC |
| | | TGCGTGGTGGTGGATGTGTCTCACGAGGACCCCGAAGTGAAGTT |
| | | CAATTGGTACGTGGACGGCGTGGAAGTGCACAACGCCAAGACCAA |
| | | GCCTAGAGAGGAACAGTACAACAGCACCTACAGAGTGGTGTCCGT |
| | | GCTGACAGTGCTGCACCAGGATTGGCTGAACGGCAAAGAGTACAA |
| | | GTGCAAGGTGTCCAACAAGGCCCTGCCTGCTCCTATCGAGAAAAC |
| | | CATCAGCAAGGCCAAGGGCCAGCCTAGGGAACCCCAGGTTTACAC |
| | | ACTGCCTCCAAGCCGCGAGGAAATGACCAAGAACCAGGTGTCCCT |
| | | GACCTGCCTCGTGAAGGGCTTCTACCCTTCCGATATCGCCGTGGA |
| | | ATGGGAGAGCAATGGCCAGCCTGAGAACAACTACAAGACAACCCC |
| | | TCCTGTGCTGGACAGCGACGGCTCATTCTTCCTGTACAGCAAGCT |
| | | GACCGTGGACAAGTCCAGATGGCAGCAGGGCAACGTGTTCAGCT |
| | | GTAGCGTGCTGCACGAAGCCCTGCACAGCCACTACACCCAGAAAA |
| | | GCCTGTCTCTGAGCCCCGGCAAATGATAA (SEQ ID NO: 1204) |
| | husec2 v1 | ATGGATTGGATTTGGAGAATCCTGTTCCTCGTGGGCGCCGCTACC |
| | | GGAGCCCACTCC (SEQ ID NO: 3) |
| | husec2 v2 | ATGGATTGGATCTGGCGCATCCTGTTTCTCGTGGGAGCTGCCACA |
| | | GGCGCCCACTCT (SEQ ID NO: 5) |
| | 5′UTR (cap proximal | AGAATAAACTAGTATTCTTCTGGTCCCCACAGACTCAGAGAGAAC |
| | sequence + human alpha- | CCGCCACC (SEQ ID NO: 11) |
| | Globin + Kozak) | |
| | 3′UTR (FI-Element + | CTGGTACTGCATGCACGCAATGCTAGCTGCCCCTTTCCCGT |
| | polyA30LA70) | CCTGGGTACCCCGAGTCTCCCCCGACCTCGGGTCCCAGGT |
| | | ATGCTCCCACCTCCACCTGCCCCACTCACCACCTCTGCTAG |
| | | TTCCAGACACCTCCCAAGCACGCAGCAATGCAGCTCAAAAC |
| | | GCTTAGCCTAGCCACACCCCCACGGGAAACAGCAGTGATT |
| | | AACCTTTAGCAATAAACGAAAGTTTAACTAAGCTATACTAA |
| | | CCCCAGGGTTGGTCAATTTCGTGCCAGCCACACCCTCGAGCT |
| | | AGCAAAAAAAAAAAAAAAAAAAAAAAAAAAAAAGCATATGACTAAA |
| | | AAAAAAAAAAAAAAAAAAAAAAAAAAAAAAAAAAAAAAAAAAAAAA |
| | | AAAAAAAAAAAAAAAAAAAAA (SEQ ID NO: 1195) |
| PGDM1400 | VH v2 | CAAGTTCACCTGACACAGTCTGGCCCCGAAGTGCGGAAGCCTGGC |
| | | ACAAGCGTGAAGGTGTCCTGTAAAGCCCCTGGCAACACCCTGAAA |
| | | ACCTACGACCTGCACTGGGTCCGATCTGTGCCTGGACAAGGACTG |
| | | CAGTGGATGGGCTGGATTAGCCACGAGGGCGACAAGAAAGTGAT |
| | | CGTGGAACGGTTCAAGGCCAAAGTGACCATCGACTGGGACAGAA |
| | | GCACCAACACCGCCTACCTGCAGCTGAGCGGACTGACATCTGGCG |
| | | ATACCGCCGTGTACTACTGTGCCAAGGGCAGCAAGCACCGGCTGA |
| | | GAGATTACGCCCTGTACGACGATGACGGCGCCCTGAATTGGGCCG |
| | | TCGATGTGGACTACCTGAGCAACCTGGAATTCTGGGGCCAGGGAA |
| | | CAGCCGTGACAGTGTCTAGT (SEQ ID NO: 40) |
| | VL | GATTTTGTCCTGACTCAGTCTCCACACTCTCTGTCCGTCACCCCTG |
| | | GAGAGTCGGCCTCCATCTCCTGCAAGTCTAGTCACAGCCTCATTC |
| | | ATGGTGATAGGAACAATTATTTGGCTTGGTACGTACAGAAGCCAG |
| | | GGCGGTCTCCACAACTCCTGATCTATTTGGCTTCCAGTCGGGCCT |
| | | CCGGGGTCCCTGACAGGTTCAGTGGCAGTGGATCGGACAAAGAT |
| | | TTTACACTGAAGATCAGCAGAGTGGAGACTGAGGATGTTGGGAC |
| | | GTATTACTGCATGCAAGGTCGAGAAAGTCCCTGGACGTTCGGCCA |
| | | AGGGACCAAGGTGGACATCAAA |
| | | (SEQ ID NO: 45) |

[1341] An overview of the individual plasmids are shown in Table 18 below.

TABLE 18
Exemplary plasmids encoding CrossMab chains

| Molecule | Target Site | Format | Plasmid Insert |
|---|---|---|---|
| PGDM1400 | V1V2Apex | IgG1 | VH(PGDM1400)-CK-Fc(LS) (SEQ ID NO: 1317) |
| | | CrossMab^{CH1-CLx} | VH(PGDM1400)-CK-Fc(GAALIE LS) (SEQ ID NO: 1329) |
| | | | VH(PGDM1400)-CK-Fc(cah LS) (SEQ ID NO: 1332) |
| | | | VH(PGDM1400)-CK-Fc(GAALIE cah LS) (SEQ ID NO: |
| | | | 1335) |
| | | | VH(PGDM1400)-CK-Fc(cak LS) (SEQ ID NO: 1338) |
| | | | VL(PGDM1400)-CH1 (SEQ ID NO: 1320) |
| | | IgG1 | VH(PGDM1400)-CH1cv-Fc (LS) (SEQ ID NO: 1323) |
| | | CrossMab^{CH1-CLcv} | VL(PGDM1400)-CKcv (SEQ ID NO: 1326) |

### Linearization and DNA Purification

[1342] Linearization of plasmid DNA was performed using appropriate restriction enzymes, followed by purification of the linearized DNA template using magnetic beads (Dynabeads™ MyOne™ Carboxylic Acid) according to the manufacturer's protocol. The DNA concentration was measured by UV spectroscopy.

### In Vitro Transcription

[1343] CleanCap 413 ((m7(3′OMeG)(5′)ppp(5′)(2′OMeA)pG) capped RNA was produced following the process as disclosed, e.g., in Kreiter, S. et al. Cancer Immunol. Immunother. 56, 1577-87 (2007) and WO 2021214204A1, each of which is incorporated herein by reference in its entirety. Methyl pseudo-uridine was used in the in vitro transcription reaction and incorporated into the produced RNA. Cellulose purification of the resulting RNA was performed to isolate single-stranded RNA, followed by concentration measurement by UV spectroscopy. The RNA integrity was determined by microfluidic-based electrophoresis. The resulting RNA constructs are shown in SEQ ID NOs: 900, 901, 905, 906, 910, 950 (heavy chain) and 947 and 997 (light chain).

### Example 5: In Vitro Validation of PGDM1400 IgG1 Antibody Agents Delivered to Cells Using RNA Constructs

### Expression and Neutralization Analysis of PGDM1400 and PGDM1400 L/S Antibody Agents Delivered to Cells Using RNA Constructs

[1344] In order to determine whether polyribonucleotides encoding PGDM1400 IgG antibody agents, as described herein, can induce the production of the PGDM1400 IgG antibody agents, the expression and neutralization capabilities of the PGDM1400 IgG antibody agents were tested.

[1345] Additionally, it is advantageous that antibody agents delivered by polyribonucleotides may be able to reach a high antibody titer in the serum of subjects, e.g., over a period of time. Thus, a mutation was introduced (“L/S”) in the CH₃ domain of certain antibody agents to improve binding to the FcRn receptor and thereby improve the terminal kinetic and increase the half-life of the antibody agent (see, for example, Zalevsky et al., 2010, Nature biotechnology, which is incorporated herein by reference in its entirety). In this Example, PGDM1400 antibody agents designed with this mutation were evaluated for whether the mutation impacts certain parameters like expression or neutralization abilities. Antibody agents may also be modified with GAALIE mutations (G236A/A330L/I332E) in the Fc region so as to enhance dendritic cell maturation and induce protective CD8+ T cell responses (see, for example, Corti et al., 2021, Cell, which is incorporated herein by reference).

[1346] In this experiment, the expression of PGDM1400 and PGDM1400 L/S IgG antibody agents from polyribonucleotides described herein was tested.

[1347] Objectives of this Example include: Evaluating the expression and purity of PGDM1400 and PGDM1400 L/S IgG antibody agents by Gyros and Western blot.

[1348] In this Example, HEK293T/17 cells were electroporated with polyribonucleotides encoding an PGDM1400 IgG antibody agent (polyribonucleotides shown in SEQ ID NOs: 1306 (heavy chain) and 1312 (light chain)), an PGDM1400 L/S IgG antibody agent (polyribonucleotides shown in SEQ ID NOs: 1309 (heavy chain) and 1312 (light chain)), and a control antibody agent (referred to as “RiboMab01”) (1.5:1 HC/LC). The respective antibody agent concentrations in the supernatant were determined by GYROS ELISA. Reducing and non-reducing denaturing Western blot analyses were also performed to check the ratio of antibody agents produced versus high molecular weight (HMW) aggregates and free chains.

### Electroporation

[1349] 25 μg RNA (1.5/1 HC/LC, 15 μg HC+10 μg LC) of polyribonucleotides encoding PGDM1400 HC, PGDM1400 L/S HC and PGDM1400 LC in IgG1 format were delivered to HEK293T/17 cells electroporation in triplicate. RiboMab01 was used as a control. First, HEK293T/17 cells were washed 2×with 20 ml cooled medium. Electroporation was performed in triplicate in pre-cooled 0.4 cm cuvettes. Cells in each sample were in a concentration of 2*10⁶ cells/250 μl or 8*10⁶ cells/ml. Electroporation conditions were 250V, 2 pulses for 5 ms. Cells were incubated on ice for 10 minutes after electroporation. 0.75 ml of Expi293 Expression Medium was prepared in a well of a 12-well plate for resuspension of each sample.

[1350] Other cells were then transferred into Expi293 Medium and counted. Cells were seeded at 2*10⁶ cells/ml or 1 ml/well and incubated for 48 hours at 37° C. Supernatants were harvested by centrifugation of the cells at 300g for 10 minutes, followed by careful aspiration so as to not disturb the cell pellet, and then stored at 4° C.

### Gyros ELISA for RibobNAb Quantitation

[1351] PGDM1400 antibody agents expressed from polyribonucleotides delivered to a cell (referred to herein as “RibobNAbs”), as described in Examples 2-4, were quantified in serum using Gyros xPand™ XPA1025 ELISA device (Gyros Protein Technologies AB, Uppsala, Sweden). A sandwich immunoassay format was performed using a biotinylated anti-human IgG Fc antibody (Reagent A, ready-to-use solution) for capture and Alexa® Fluor® 647 labeled anti-human IgG (Reagent B, ready-to use solution, both from Generic PK Kit-Low Titer or Generic TK Kit-High Titer, Gyros Protein Technologies AB) for the detection of RibobNab IgG, IgG L/S formats.

[1352] A sandwich immunoassay format was also performed to determine intact (fully assembled) RibobNAbs IgG, IgG L/S, IgG CrossMab or scFv-Fc content in cell culture supernatant samples from HEK293T17 cells transfected with mRNA. The RibobNAbs were captured by a biotinylated derivative of protein A from Staphylococcus aureus (Reagent A, ready-to-use solution from Gyrolab huIgG Kit, Gyros Protein Technologies AB). An Alexa Fluor 647 labeled F(ab′)2 fragment of anti-human IgG (Reagent B, ready-to-use solution from Gyrolab huIgG Kit, Gyros Protein Technologies AB) was used for detection of RibobNAb IgG, IgG L/S or IgG CrossMab formats and 25 nM of Goat anti-Human IgG (H+L) Cross-Adsorbed Secondary Antibody, Alexa Fluor 647 (Thermo Fisher Scientific, Darmstadt) in Rexxip F (Gyros Protein Technologies AB) for scFv-Fc format, respectively.

[1353] The assay was processed for low titer in a Gyrolab Bioaffy 1000 HC CD (Gyros Protein Technologies AB) with a dynamic range of 1.4 to 333 ng/mL (IgG, IgG L/S formats in serum) and 12.3 to 9,000 ng/mL (IgG, IgG L/S, IgG CrossMab formats in cell culture supernatant), or for high titer in a Gyrolab Bioaffy 20 HC CD (Gyros Protein Technologies AB) with a dynamic range of 111 to 234,000 ng/mL (IgG, IgG L/S in serum) and 111 to 9,000 ng/mL (scFv-Fc Format in cell culture supernatant), respectively.

[1354] All samples, reference proteins and reagents were centrifuged for 4 minutes at 12,000×g to sediment any aggregates. Serum samples containing the respective RibobNAb molecules were diluted 10-fold in Reagent F buffer (Gyrolab PK Low Titer/TK Kit High Titer, Gyros Protein Technologies AB) and RibobNAbs molecules in cell culture supernatant diluted 5 to 10-fold in Reagent E buffer (Gyrolab huIgG Kit, Gyros Protein Technologies AB), respectively. The CD columns were washed with Reagent C and D (Gyrolab PK/TK Kit, Gyrolab huIgG Kit, Gyros Protein Technologies AB).

[1355] The Gyrolab huIgG Standard (Gyros Protein Technologies AB), recombinant PGT121 L/S antibody (Lake Pharma Inc., San Carlos, CA) and the recombinant Anti-APRIL, human IgG1 lambda scFv-Fc (Biomol GmbH, Hamburg) served as reference proteins to calculate IgG, IgG L/S, IgG CrossMab or scFv-Fc RibobNAbs concentration in the assays, respectively.

[1356] For RibobNAb quantitation, all materials prepared for the Gyros ELISA assay were loaded onto a 96-well plate (Gyros Protein Technologies AB) according to the Gyrolab loading list. Data were generated for low RibobNAb titers with the Gyrolab Generic PK kit method v1 (serum) and huIgG Low Titer method (cell culture supernatant) and for high RibobNab titers with Gyrolab Generic TK kit method v1 (serum) and huIgG High Titer v2 method (cell culture supernatant), respectively. Results were evaluated using the Gyrolab Evaluator software.

[1357] All materials prepared for the Gyros ELISA assay were loaded onto a 96-well plate (Gyros Protein Technologies AB) according to the Gyrolab Loading list.

[1358] Data was generated for low RibobNAb titers with the Gyrolab Generic PK kit method v1 and the results evaluated using Gyrolab Evaluator software.

### Western Blot Analysis of RibobNAbs in Cell Culture Supernatants

[1359] Cell culture supernatant (SN) samples were first mixed with varying volumes of SN from mock-transfected HEK293T/17 cells, a fixed volume of water as well as 4× Laemmli buffer and heated to 95° C. for 5 minutes under non-reducing conditions. Two different samples of the reference protein (5726/5725p) were used for gauging RibobNAb quality in the SN, containing (i) 0.23% or (ii) 96.5% HMW intermediates. As negative control, SN from Mock-transfected HEK-293T-17 cells was used. The samples were separated by SDS-PAGE for 40 minutes followed by transfer of the separated bands onto a blotting membrane (Bio-Rad). For western blotting, the membrane was incubated with two HRP-conjugated detection antibodies: goat anti-human kappa LC at a 1:500 dilution (ID176, Thermo Fisher Scientific) and goat anti-human IgG Fd region pAb (Cell Sciences, Newburyport, MA, USA) at a 1:2,000 dilution in 3% BSA Fraction V (Eurobio Scientific, Les Ulis, France). The membrane was visualized with Clarity Western ECL Reagent (Bio-Rad) on a Vilber Fusion FX imaging device (Vilber, Collégien, France) for 4 seconds and the data analyzed with Image Lab Software (Bio-Rad).

### Results

[1360] The results from the Gyros ELISA in this Example show that PGDM1400 and PGDM1400 L/S IgG antibody agents were produced at a similar level to the control RiboMab “RiboMab01” (see FIG. 11).

[1361] The results from the Western blot analysis are shown in FIG. 12. The non-reducing denaturing Western blot of PGDM1400 and PGDM1400 L/S IgG antibody agents did not show aggregates, HMW aggregates, or free (unbound) light chains. The Western blot results of PGDM1400 IgG antibody agent, PGDM1400 L/S IgG antibody agent, and the RiboMab01 control displayed a similar expression pattern with a main fraction of the antibodies as fully assembled monomeric (>80%) at the correct height. Reducing conditions revealed HC and LC bands were found at the correct height. Non-reducing conditions revealed PGDM1400 IgG antibody agent and PGDM1400 L/S IgG antibody agent monomer bands. These results suggest that PGDM1400 IgG antibody agent and PGDM1400 L/S IgG antibody agent were correctly assembled.

### Neutralization Studies

[1362] The TZM-bl assay was used to determine the neutralization capacity of PGDM1400 and PGDM1400 L/S IgG antibody agents (e.g., as described in Sarzotti-Kelsoe et al., 2014. Journal of immunological methods, which is incorporated herein by reference). TZM-bl cells are engineered to express CD4, CCR5, and CXCR4 and to contain integrated reporter genes for firefly Luc and E. coli β-galactosidase under the control of an HIV-1 long terminal repeat.

[1363] First, HEK293T/17 cells were transfected with RNA which encoded for IgG RibobNAb antibody agent. HEK293T/17 cells were then cultured under suitable conditions and for a suitable length of time so as to allow for RibobNAb production and secretion into the cell culture supernatant. HEK293T/17 cell culture supernatant was then harvested and added to TZM-bl cells at the same time that samples containing virus were added to TZM-bl cells. The TZM-bl cells were then incubated for about 48 hours, followed by addition of a Luc reporter gene assay system reagent. Virus infectivity was measured in relative luminescence units (RLU).

[1364] Initial HIV neutralization studies showed that PGDM1400 IgG antibody agent and PGDM1400 L/S IgG antibody agents had good breadth and potency (data not shown). Additional HIV neutralization studies assessing capabilities of the PGDM1400 and PGDM1400 L/S IgG antibody agents using a Viral Neutralization Test (VNT) will be performed. The supernatant from this Experiment will also be used to test the HIV neutralization capabilities using a VNT.

### Example 6: In Vitro Validation of scFv-Fc PGDM1400 L/S Antibody Agents Delivered to Cells Using RNA Constructs

Expression and Neutralization Analysis of scFv-Fc PGDM1400 L/S Antibody Agents Delivered to Cells Using RNA Constructs

[1365] Generation of polyribonucleotides encoding for PGDM1400 antibody agents as described herein allows the PGDM1400 antibody agents to be delivered in combination with other polyribonucleotides that encode additional anti-HIV antibody agents. Use of the technologies and approaches described herein also allows for simultaneous production of different antibody agents from polyribonucleotides. The formats of antibody agents have been designed to minimize or eliminate the risk of immunoglobulin chain mispairing. Being able to combine multiple antibody agent formulations as described herein (e.g., including an PGDM1400 antibody agent) allows for the development of a composition (e.g., a pharmaceutical composition) that delivers multiple antibody agents together so that they can bind different epitopes of the HIV virus, thereby minimizing viral escape through mutations.

[1366] In order to determine whether polyribonucleotides encoding scFv-Fc PGDM1400 L/S antibody agents, as described herein, can induce the production of the scFv-Fc PGDM1400 L/S antibody agents, the expression and neutralization capabilities of the scFv-Fc PGDM1400 L/S antibody agents were tested. Different domain orientations of VH:VL and linkers lengths were utilized in the scFv-Fc PGDM1400 L/S antibody agents tested.

[1367] Objectives of this Example include:
[1368] (1) Evaluate the expression and aggregation of scFv-Fc PGDM1400 L/S antibody agents by Gyros and Western Blot; and
[1369] (2) Test the influence of different domain orientations and linker length on the production and functionality of scFv-Fc PGDM1400 L/S antibody agents.

[1370] In this Example, HEK293T/17 cells were electroporated with polyribonucleotides encoding various scFv-Fc PGDM1400 L/S antibody agents (polyribonucleotides as shown in SEQ ID NO: 1342 (“VH-LL4-VL”), SEQ ID NO: 1345 (“VH-LL5-VL”), SEQ ID NO: 1348 (“VL-LL4-VH”), and SEQ ID NO: 1351 (“VL-LL5-VH”)) and a control RiboMab01 (1.5:1 HC/LC). The scFv-Fc PGDM1400 L/S antibody agent concentration in the supernatant was determined by GYROS ELISA. A non-reducing denaturing Western blot analysis was also performed to check the ratio of antibody agents produced as compared to HMW aggregates and free chains.

### Methods

[1371] Electroporation, Gyros ELISA for RibobNAb Quantification, and Western Blot Analysis of RibobNAbs in Cell Culture Supernatants were performed as described above in Example 5.

### Results

[1372] The results from the Gyros ELISA in this Example show that all scFv-Fc PGDM1400 L/S antibody agents were successfully expressed. VL-LL5-VH orientation was optimal for expression of a scFv-Fc PGDM1400L/S antibody agent. FIG. 13 shows the results relative to parental IgG.

[1373] The results from the Western Blot Analysis are shown in FIG. 14. The results from the Western Blot analysis show that all scFv-Fc PGDM1400L/S antibody agents are correctly assembled and show no Aggregates and LMWs.

### Neutralization Studies

[1374] The TZM-bl assay was used to determine the neutralization capacity of scFv-Fc PGDM1400 antibody agents (e.g., as described in Sarzotti-Kelsoe et al., 2014. Journal of immunological methods). TZM-bl cells are engineered to express CD4, CCR5, and CXCR4 and to contain integrated reporter genes for firefly Luc and E. coli β-galactosidase under the control of an HIV-1 long terminal repeat.

[1375] Briefly, HEK293T/17 cells were transfected with RNA that encoded for IgG RibobNAb antibody agent (PGDM1400 scFv-Fc and PGDM1400 parental IgG control). HEK293T/17 cells were then cultured under suitable conditions and for a suitable length of time so as to allow for RibobNAb production and secretion into the cell culture supernatant. HEK293T/17 cell culture supernatant was then harvested and added to TZM-bl cells at the same time that samples containing virus were added to TZM-bl cells. The TZM-bl cells were then incubated for about 48 hours, followed by addition of a Luc reporter gene assay system reagent. Virus infectivity was measured in relative luminescence units (RLU).

[1376] In detail: Pseudovirus generation: HIV-1 Env pseudotyped viruses were prepared by co-transfecting exponentially-dividing HEK293T/17 cells (5×10⁶ cells in 15 ml growth medium in a T-75 culture flask) with 4 μg of rev/env expression plasmid and 8 μg of an env-deficient HIV-1 backbone vector (pSG3Δenv) using FuGENE 6 reagent (Promega, USA) in growth medium, as described by the manufacturer. Virus-containing culture supernatants were recovered from the flasks and filtered through a 0.45 μm filter. Env-pseudotyped virus stocks were titrated by performing serial 5-fold dilutions in growth medium in 96-well culture plates (11 dilution steps total). Freshly trypsinized TZM-bl cells (10,000 cells in 100 μl volume) were added to each well in growth medium containing an optimized concentration of DEAE-dextran and incubated for 48 hrs. 100 μl of culture supernatant was removed from each well and replaced with a Luc reporter gene assay system reagent (Brite-Glo, Promega, used as per manufacturer's recommendation). After a 2-min incubation at room temperature to allow cell lysis, 150 μl of cell lysate was transferred to 96-well black solid plates (Corning-Costar) for measurements of luminescence. For each Env pseudotyped virus an optimal dilution to use in the TZM-bl assay (expressed as RLU equivalent) was calculated to ensure a standardized virus dose.

[1377] pVNT assay: HEK293T/17 cells were transfected with RNA that encoded for PGDM1400 RibobNAb L/S antibody agents (VH-LL4-VL, VL-LL5-VH, VH-LL5-VL, and VL-LL4-VH configurations). HEK293T/17 cells were then cultured under suitable conditions and for a suitable length of time so as to allow for RibobNAb production and secretion into the cell culture supernatant. Supernatants from cells transfected with polyribonucleotides or purified IgG samples were tested at indicated primary dilutions/concentrations and serially diluted 3-fold 7-times in duplicate wells. Diluted samples were mixed with an optimal titer of Env-pseudotyped virus and co-incubated at 37° C. for 1 h. TZM-bl cells were then added at a final concentration of 10⁴ cells per well in a 96-well plate in medium supplemented with DEAE-dextran for 48 hrs at 37° C. and 5% CO2. 100 μl of culture supernatant was removed from each well and replaced with a Luc reporter gene assay system reagent (Brite-Glo, Promega, used as per manufacturer's recommendation). After a 2-min incubation at room temperature to allow cell lysis, 150 μl of cell lysate was transferred to 96-well black solid plates (Corning-Costar) for measurements of luminescence. After subtracting background relative luminescence units (RLUs) of non-infected TZM-bl cells, 50% and 80% inhibitory concentrations (IC50s and IC80s) were determined as the antibody/IgG concentrations resulting in a 50/o/80% RLU reduction compared to untreated virus control wells. The following HIV-1 Env pseudovirus isolates were selected for testing against cell supernatants or purified IgG: ZM53M.PB12, Du156.12, Q769.d22, 0330.v4.c3, R2184.c04, 89-F1_2_25, CAP304_2_00_F6_6, Ce1176_A3, 6980.v0.c31, 1012_11_TC21_3257, and PVO.4. A Murine Leukemia Virus (MuLV) pseudovirus was used as a negative control.

[1378] Initial HIV neutralization studies showed that scFv-Fc PGDM1400 L/S antibody agents had good breadth and potency (data not shown). Additional HIV neutralization studies assessing capabilities of the scFv-Fc PGDM1400 L/S antibody agents using a Viral Neutralization Test (VNT) will be performed. The supernatant from this Experiment will also be used to test the HIV neutralization capabilities using a VNT.

[1379] FIG. 19 and FIG. 20 show results from pVNT assays and confirm that scFv-Fc PGDM1400 L/S antibody agents had good breadth and potency. Specifically, PGDM1400 L/S scFv-Fc RibobNAb variants are functional and neutralize HIV strains more efficiently than the parental PGDM1400 IgG control. Additionally, PGDM1400 L/S scFv-Fc VL-VH RibobNAb variants (VL-LL4-VH and VL-LL5-VH) have increased potency against a PGDM1400 insensitive strain Ce1176_A3 compared to the parental PGDM1400 IgG control and the PGDM1400 L/S scFv-Fc VH-VL RibobNAb variants (VH-LL4-VL and VH-LL5-VL) (FIG. 20).

[1380] Additionally, pVNT assays were performed according to the same methods described above, testing further neutralization capacity of scFv-Fc VL-VH RibobNAb variants VL-LL5-VH (the full RNA construct sequence as shown in SEQ ID NO: 603; the polyribonucleotide encoding the scFv-Fc chain as shown in SEQ ID NO: 1351, which encodes the amino acid sequence as shown in SEQ ID NO: 1352) against the following HIV-1 Env pseudovirus isolates: CAP45, X2088_c9, CNE8, Du172.17, T250-4, QH0692.42, 3103.v3.c10, C1080_c3, T278-50, ZM109F.PB4, and Du156.12. It had previously been observed that PGDM1400 does not neutralize strains X2088_C9 and QH0692.42. Accordingly, these strains served as negative controls.

[1381] FIG. 22 shows results from the pVNT assay. scFv-Fc LS RibobNAbs (VL-LL5-VH) showed good breadth and potency against the additional strains tested. The scFv-Fc LS RibobNAb construct (VL-LL5-VH) did not neutralize strains X2088_C9 and QH0692.42 as expected. Additionally, scFv-Fc LS RibobNAbs (VL-LL5-VH) showed improved neutralization with respect to the parental IgG control.

### Example 7: In Vitro Validation of CrossMab PGDM1400 L/S Antibody Agents Delivered to Cells Using RNA Constructs

Expression and Neutralization Analysis of PGDM1400 CrossMab^{CH1-CLx} and PGDM1400 CrossMab^{CH1-CLcv} Antibody Agents Delivered to Cells Using RNA Constructs

[1382] Generation of polyribonucleotides encoding for PGDM1400 antibody agents as described herein allows the PGDM1400 antibody agents to be delivered in combination with other polyribonucleotides that encode additional anti-HIV antibody agents. Use of the technologies and approaches described herein also allows for simultaneous production of different antibody agents from polyribonucleotides. The formats of antibody agents have been designed to minimize or eliminate the risk of immunoglobulin chain mispairing. Being able to combine multiple antibody agent formulations as described herein (e.g., including a PGDM1400antibody agent) allows for the development of a composition (e.g., a pharmaceutical composition) that delivers multiple antibody agents together so that they can bind different epitopes of the HIV virus, thereby minimizing viral escape through mutations.

[1383] In order to determine whether polyribonucleotides encoding CrossMab PGDM1400 L/S antibody agents, as described herein, can induce the production of the CrossMab PGDM1400 L/S antibody agents, the expression and neutralization capabilities of the CrossMab PGDM1400 L/S antibody agents were tested.

[1384] Objectives of this Example include:
[1385] (1) Evaluate the expression and aggregation of CrossMab PGDM1400 L/S antibody agents by Gyros and Western Blot; and
[1386] (2) Test the influence of different domain swaps and charge variations on the production and functionality of scFv-Fc PGDM1400 L/S antibody agents.

[1387] In this Example, HEK293T/17 cells were electroporated with polyribonucleotides encoding various CrossMab^{CH1-CLx} PGDM1400 L/S antibody agents (polyribonucleotides as shown in SEQ ID NO: 1318 (VH(PGDM1400)-CK-Fc(LS)) and 1321 (VL(PGDM1400)-CH₁); SEQ ID NO: 1330 VH(PGDM1400)-CK-Fc(GAALIE LS) and SEQ ID NO: 1321; SEQ ID NO: 1333 (VH(PGDM1400)-CK-Fc(cah LS)) and SEQ ID NO: 1321; and SEQ ID NO: 1339 (VH(PGDM1400)-CK-Fc(cak LS)) and SEQ ID NO: 1321) and CrossMab^{CH1-CLcv} (SEQ ID NO: 1324 (VH(PGDM1400)-CH₁cv-Fc (LS))) and SEQ ID NO: 1327) and a control RiboMab01 (1.5:1 HC/LC). The CrossMab PGDM1400 L/S antibody agent concentration in the supernatant was determined by GYROS ELISA. A non-reducing denaturing Western blot analysis was also performed to check the ratio of antibody agents produced as compared to HMW aggregates and free chains.

### Methods

[1388] Electroporation, Gyros ELISA for RibobNAb Quantification, and Western Blot Analysis of RibobNAbs in Cell Culture Supernatants were performed as described above in Example 5.

### Results

[1389] The results from the Gyros ELISA are shown in FIG. 15. The results from the Gyros ELISA showed that all PGDM1400 CrossMab^{CH1-CLx} and PGDM1400 CrossMab^{CH1-CLcv} antibody agents were successfully expressed and produced in HEK-293T/17 cells. Additionally, results showed that PGDM1400 CrossMab^{CH1-CLcv} L/S was expressed at a level about 3 times lower compared to the control RiboMab01 and at about half the level of expression of the parental control (PGDM1400 L/S IgG antibody agent), and that the PGDM1400CrossMab^{CH1-CLcx} antibody agent was expressed at about half the level of the control RiboMab01 and at a similar level as the parental control (PGDM1400 LS IgG antibody agent).

[1390] The results from the Western Blot analysis are shown in FIG. 16. The Western Blot Analysis showed that all PGDM1400 CrossMab^{CH1-CLx} and PGDM1400 CrossMab^{CH1-CLcv} antibody agents were correctly assembled and show no aggregates or HMW aggregates.

### Neutralization Studies

[1391] A TZM-bl assay was used to determine the neutralization capacity of PGDM1400 CrossMab antibody agents (e.g., as described in Sarzotti-Kelsoe et al., 2014. Journal of immunological methods). TZM-bl cells are engineered to express CD4, CCR5, and CXCR4 and to contain integrated reporter genes for firefly Luc and E. coli β-galactosidase under the control of an HIV-1 long terminal repeat.

[1392] Briefly, HEK293T/17 cells were transfected with RNA that encoded for IgG RibobNAb antibody agent (PGDM1400 CH₁-CHx L/S, PGDM1400 CH₁-CLcv, and PGDM1400 parental IgG control). HEK293T/17 cells were then cultured under suitable conditions and for a suitable length of time so as to allow for RibobNAb production and secretion into the cell culture supernatant. HEK293T/17 cell culture supernatant was then harvested and added to TZM-bl cells at the same time that samples containing virus were added to TZM-bl cells. The TZM-bl cells were then incubated for about 48 hours, followed by addition of a Luc reporter gene assay system reagent. Virus infectivity was measured in relative luminescence units (RLU).

[1393] In detail: Pseudovirus generation: HIV-1 Env pseudotyped viruses were prepared by co-transfecting exponentially-dividing HEK293T/17 cells (5×10⁶ cells in 15 ml growth medium in a T-75 culture flask) with 4 μg of rev/env expression plasmid and 8 μg of an env-deficient HIV-1 backbone vector (pSG3Δenv) using FuGENE 6 reagent (Promega, USA) in growth medium, as described by the manufacturer. Virus-containing culture supernatants were recovered from the flasks and filtered through a 0.45 μm filter. Env-pseudotyped virus stocks were titrated by performing serial 5-fold dilutions in growth medium in 96-well culture plates (11 dilution steps total). Freshly trypsinized TZM-bl cells (10,000 cells in 100 μl volume) were added to each well in growth medium containing an optimized concentration of DEAE-dextran and incubated for 48 hrs. 100 μl of culture supernatant was removed from each well and replaced with a Luc reporter gene assay system reagent (Brite-Glo, Promega, used as per manufacturer's recommendation). After a 2-min incubation at room temperature to allow cell lysis, 150 μl of cell lysate was transferred to 96-well black solid plates (Corning-Costar) for measurements of luminescence. For each Env pseudotyped virus an optimal dilution to use in the TZM-bl assay (expressed as RLU equivalent) was calculated to ensure a standardized virus dose.

[1394] pVNT assay: HEK293T/17 cells were transfected with RNA which encoded for IgG RibobNAb antibody agent (PGDM1400 CH₁-CHx L/S, PGDM1400 CH₁-CLcv, and parental IgG control). HEK293T/17 cells were then cultured under suitable conditions and for a suitable length of time so as to allow for RibobNAb production and secretion into the cell culture supernatant.

[1395] Supernatants from cells electroporated with polyribonucleotides or purified IgG samples were tested at indicated primary dilutions/concentrations and serially diluted 3-fold 7-times in duplicate wells. Diluted samples were mixed with an optimal titer of Env-pseudotyped virus and co-incubated at 37° C. for 1 h. TZM-bl cells were then added at a final concentration of 10⁴ cells per well in a 96-well plate in medium supplemented with DEAE-dextran for 48 hrs at 37° C. and 5% C02. 100 μl of culture supernatant was removed from each well and replaced with a Luc reporter gene assay system reagent (Brite-Glo, Promega, used as per manufacturer's recommendation). After a 2-min incubation at room temperature to allow cell lysis, 150 μl of cell lysate was transferred to 96-well black solid plates (Corning-Costar) for measurements of luminescence. After subtracting background relative luminescence units (RLUs) of non-infected TZM-bl cells, 50% and 80% inhibitory concentrations (IC50s and IC80s) were determined as the antibody/IgG concentrations resulting in a 50%/80% RLU reduction compared to untreated virus control wells. The following HIV-1 Env pseudovirus isolates were selected for testing against cell supernatants or purified IgG: ZM53M.PB12, Du156.12, Q769.d22, 0330.v4.c3, R2184.c04, 89-F1_2_25. A Murine Leukemia Virus (MuLV) pseudovirus was used as a negative control.

[1396] Initial HIV neutralization studies showed that PGDM1400 CrossMab^{CH1-CLx} antibody agent and PGDM1400 CrossMab^{CH1-CLcv} antibody agents had good breadth and potency (data not shown). Additional HIV neutralization studies assessing capabilities of the PGDM1400 CrossMab antibody agents using a Viral Neutralization Test (VNT) will be performed. The supernatant from this Experiment will also be used to test the HIV neutralization capabilities using a VNT.

[1397] FIG. 21 shows results from pVNT assays and confirm that PGDM1400 CrossMab^{CH1-CLx} antibody agents and PGDM1400 CrossMab^{CH1-CLcv} antibody agents had good breadth and retain potency.

### Example 8: In Vivo Validation of Parental and Mutated PGDM1400 RibobNAbs

[1398] Generation of polyribonucleotides encoding for PGDM1400 antibody agents as described herein allows the PGDM1400 antibody agents to be delivered in combination with other polyribonucleotides that encode additional anti-HIV antibody agents. Use of the technologies and approaches described herein also allows for simultaneous production of different antibody agents from polyribonucleotides. The formats of antibody agents have been designed to minimize or eliminate the risk of immunoglobulin chain mispairing. Being able to combine multiple antibody agent formulations as described herein (e.g., including an PGDM1400 antibody agent) allows for the development of a composition (e.g., a pharmaceutical composition) that delivers multiple antibody agents together so that they can bind different epitopes of the HIV virus, thereby minimizing viral escape through mutations.

[1399] The present Example shows that polyribonucleotides encoding PGDM1400 antibody agents can induce production of PGDM1400 antibody agents in vivo. Furthermore, the present Example shows that polyribonucleotides encoding PGDM1400 antibody agents can drive a high antibody titer in the serum of test subjects over a period of time. A mutation (“L/S”) was introduced in the CH₃ domain of certain antibody agents to improve binding to the FcRn receptor and thereby improve the terminal kinetic and increase the half-life of the antibody agent (see, for example, Zalevsky et al., 2010, Nature biotechnology). In this Example, the pharmacokinetic properties of PGDM1400 and PGDM1400 L/S IgG antibody agents were evaluated to assess the mutation's effect on such antibody qualities. NSG and NSG hFcRn TG32 mice were used. NSG hFcRn TG32 mice include a genetic modification where the murine FcRn receptor has been exchanged to the human version.

[1400] The concentration of the PGDM1400 Antibody and L/S mutated PGDM1400 Antibody in serum of NSG and NSG hFcRn Tg32 mice was analyzed.

[1401] NSG and NSG hFcRn TG32 mice were injected intravenously with LNP-encapsulated polyribonucleotides encoding PGDM1400 and PGDM1400 L/S IgG antibody agents (1.5:1 HC/LC) (polyribonucleotides as shown in SEQ ID NO: 1306 and 1312 (PGDM1400 IgG HC and LC, respectively) and SEQ ID NO: 1309 and 1312 (PGDM1400 L/S IgG HC and LC, respectively)) in 150 μL of PBS. Blood was sampled from the both mice strains at various time points, and serum was analyzed for the abundance of the RibobNAbs over a time period of either 25 (NSG mice) or 33 days (NSG hFcRn TG32 mice) with Gyros ELISA, as described herein.

### Results

[1402] The results in NSG and NSG hFcRn TG32 mice are presented in FIG. 17 (panel A and panel B, respectively), respectively, in log scale. In NSG mice, the PGDM1400 IgG antibody agent had a similar pharmacokinetic profile to the control, RiboMab01. Furthermore, the PGDM1400 L/S IgG antibody agent displayed similar pharmacokinetics as compared to the PGDM1400 IgG antibody. In the NSG hFcRn T32 mice, PGDM1400 IgG antibody agent had improved pharmacokinetic profile compared to the control, RiboMab01. Additionally, the PGDM1400 L/S IgG antibody agent displayed improved pharmacokinetics as compared to the PGDM1400 IgG antigen agent, confirming that the L/S mutation can indeed extend antibody half-life in NSG hFcRn T32 mice. In particular, the PGDM1400 L/S IgG antibody agent had, on average, a concentration of 121 μg/ml in vivo on day 33 post-injection and the PGDM1400 IgG antibody agent had, on average, a concentration of 34 μg/ml in vivo on day 33 post-injection.

### Example 9: Generation of Polyribonucleotides Encoding PGDM1400 IgG Antibody Agents

[1403] The present Example demonstrates the generation of polyribonucleotide sequences encoding an anti-HIV antibody agent. The present Example further demonstrates that such polyribonucleotides are designed so that transient in vivo antibody agent production following i.v./i.m./s.c. delivery of the one or more polyribonucleotides is achieved.

[1404] Specifically, ribonucleic acid sequences encoding the heavy and light chain variable domains of PGDM1400 recombinantly combine with other immunoglobulin domains to form polyribonucleotides that encode PGDM1400 antibody agent immunoglobulin chains. The resulting polyribonucleotides are cloned into the JR81 DNA plasmid. The polyribonucleotides encode PGDM1400 antibody agents having different formats, including a conventional IgG1, an scFv-Fc, a CrossMab^{CH1-CLx}, a CrossMab^{CH1-CLcv}, and knob-in-hole formats (see e.g., FIGS. 4-5). Exemplary PGDM1400 antibody agent configurations and component immunoglobulin chains are shown in Table 2.

[1405] Methods of the present example include:
[1406] (1) Cloning of DNA fragments into a DNA plasmid appropriate to use for RNA expression (e.g., JR81); and
[1407] (2) Verification of selected clones by control digestion and sequencing.

[1408] An appropriate DNA plasmid may encode RNA features including, for example, a 5′ untranslated region (e.g., one that is derived from human α-globin mRNA (hAg)), a Kozak sequence, a signal peptide sequence (e.g., husec2)), and/or a 3′ untranslated region (e.g., one that is a combination of two sequence elements (FI element) and/or a polyA tail 30Linker7O (A30L70)). Examples of appropriate DNA plasmids can be found in WO2021214204A1, which is hereby incorporated by reference in its entirety.

### Codon Optimization and Cloning Strategy

[1409] Codon optimization and cloning are performed as described above in Example 2.

[1410] Exemplary sequences used in the cloning methods above are shown in Table 19 below.

TABLE 19
Exemplary sequences in PGDM1400 antibody agent encoding polyribonucleotides.

| Feature | Fragment | Nucleotide Sequence |
|---|---|---|
| General | CH1-Hinge-CH2 | GCCTCTACAAAGGGCCCTAGCGTGTTCCCTCTGGCTCCTAGCAGCAAGT |
| | (GAIE)-CH3 (LS) | CGACATCTGGCGGAACAGCCGCTCTGGGCTGTCTGGTCAAGGACTACTT |
| | (G1m3) | TCCCGAGCCTGTGACAGTGTCCTGGAACTCTGGCGCTCTGACAAGCGG |
| | | CGTGCACACATTTCCAGCCGTGCTGCAAAGCAGCGGCCTGTACTCTCTG |
| | | AGCAGCGTGGTCACAGTGCCAAGCTCTAGCCTGGGCACCCAGACCTACA |
| | | TCTGCAATGTGAACCACAAGCCTAGCAACACCAAGGTGGACAAGAGAGT |
| | | GGAACCCAAGAGCTGCGACAAGACCCACACCTGTCCTCCATGTCCTGCT |
| | | CCAGAACTGCTGGCCGGACCTTCCGTGTTCCTGTTTCCTCCAAA |
| | | GCCTAAGGACACCCTGATGATCAGCAGAACCCCTGAAGTGACCT |
| | | GCGTGGTGGTGGATGTGTCTCACGAGGACCCTGAAGTGAAGTTC |
| | | AATTGGTACGTGGACGGCGTGGAAGTGCACAACGCCAAGACCA |
| | | AGCCTAGAGAGGAACAGTACAACAGCACCTACAGAGTGGTGTCC |
| | | GTGCTGACCGTGCTGCACCAGGATTGGCTGAACGGCAAAGAGT |
| | | ACAAGTGCAAGGTGTCCAACAAGGCCCTGCCTGCCCCTGAGGAA |
| | | AAGACCATCAGCAAGGCCAAGGGCCAGCCTAGGGAACCCCAGGTTT |
| | | ACACACTGCCTCCAAGCCGCGAGGAAATGACCAAGAACCAGGTGTCCCT |
| | | GACCTGCCTCGTGAAGGGCTTCTACCCTTCCGATATCGCCGTGGAATGG |
| | | GAGAGCAATGGCCAGCCTGAGAACAACTACAAGACAACCCCTCCTGTGC |
| | | TGGACAGCGACGGCTCATTCTTCCTGTACAGCAAGCTGACCGTGGACAA |
| | | GTCCAGATGGCAGCAGGGCAACGTGTTCAGCTGTAGCGTGCTGCACGA |
| | | AGCCCTGCACAGCCACTACACCCAGAAAAGCCTGTCTCTGAGCCCCGGC |
| | | AAATGATAA (SEQ ID NO: 1205) |
| | CH1-Hinge-CH2-CH3 | GCCTCTACAAAGGGCCCTAGCGTGTTCCCTCTGGCTCCTAGCAGCAAGT |
| | (G1m17) | CGACATCTGGCGGAACAGCCGCTCTGGGCTGTCTGGTCAAGGACTACTT |
| | | TCCCGAGCCTGTGACAGTGTCCTGGAACTCTGGCGCTCTGACAAGCGG |
| | | CGTGCACACATTTCCAGCCGTGCTGCAAAGCAGCGGCCTGTACTCTCTG |
| | | AGCAGCGTGGTCACAGTGCCAAGCTCTAGCCTGGGCACCCAGACCTACA |
| | | TCTGCAATGTGAACCACAAGCCTAGCAACACCAAGGTGGACAAGAAGGT |
| | | GGAACCCAAGAGCTGCGACAAGACCCACACCTGTCCTCCATGTCCTGCT |
| | | CCAGAACTGCTCGGCGGACCTTCCGTGTTCCTGTTTCCTCCAAA |
| | | GCCTAAGGACACCCTGATGATCAGCAGAACCCCTGAAGTGACCT |
| | | GCGTGGTGGTGGATGTGTCTCACGAGGACCCAGAAGTGAAGTT |
| | | CAATTGGTACGTGGACGGCGTGGAAGTGCACAACGCCAAGACC |
| | | AAGCCTAGAGAGGAACAGTACAACAGCACCTACAGAGTGGTGTC |
| | | CGTGCTGACAGTGCTGCACCAGGATTGGCTGAACGGCAAAGAG |
| | | TACAAGTGCAAGGTGTCCAACAAGGCCCTGCCTGCTCCTATCGA |
| | | GAAAACCATCAGCAAGGCCAAGGGCCAGCCTAGGGAACCCCAGGTT |
| | | TACACACTGCCTCCAAGCCGCGAGGAAATGACCAAGAACCAGGTGTCCC |
| | | TGACCTGCCTCGTGAAGGGCTTCTACCCTTCCGATATCGCCGTGGAATG |
| | | GGAGAGCAATGGCCAGCCTGAGAACAACTACAAGACAACCCCTCCTGTG |
| | | CTGGACAGCGACGGCTCATTCTTCCTGTACAGCAAGCTGACTGTGGATA |
| | | AGTCCCGGTGGCAGCAGGGCAACGTGTTCAGCTGTTCTGTGATGCACG |
| | | AAGCCCTGCACAACCACTACACCCAGAAAAGCCTGTCTCTGAGCCCCGG |
| | | CAAGTGATAA (SEQ ID NO: 1206) |
| | CH1-Hinge-CH2-CH3 | GCCTCTACAAAGGGCCCTAGCGTGTTCCCTCTGGCTCCTAGCAGCAAGT |
| | (LS) (G1m17) | CGACATCTGGCGGAACAGCCGCTCTGGGCTGTCTGGTCAAGGACTACTT |
| | | TCCCGAGCCTGTGACAGTGTCCTGGAACTCTGGCGCTCTGACAAGCGG |
| | | CGTGCACACATTTCCAGCCGTGCTGCAAAGCAGCGGCCTGTACTCTCTG |
| | | AGCAGCGTGGTCACAGTGCCAAGCTCTAGCCTGGGCACCCAGACCTACA |
| | | TCTGCAATGTGAACCACAAGCCTAGCAACACCAAGGTGGACAAGAAGGT |
| | | GGAACCCAAGAGCTGCGACAAGACCCACACCTGTCCTCCATGTCCTGCT |
| | | CCAGAACTGCTCGGCGGACCTTCCGTGTTCCTGTTTCCTCCAAA |
| | | GCCTAAGGACACCCTGATGATCAGCAGAACCCCTGAAGTGACCT |
| | | GCGTGGTGGTGGATGTGTCTCACGAGGACCCAGAAGTGAAGTT |
| | | CAATTGGTACGTGGACGGCGTGGAAGTGCACAACGCCAAGACC |
| | | AAGCCTAGAGAGGAACAGTACAACAGCACCTACAGAGTGGTGTC |
| | | CGTGCTGACAGTGCTGCACCAGGATTGGCTGAACGGCAAAGAG |
| | | TACAAGTGCAAGGTGTCCAACAAGGCCCTGCCTGCTCCTATCGA |
| | | GAAAACCATCAGCAAGGCCAAGGGCCAGCCTAGGGAACCCCAGGTT |
| | | TACACACTGCCTCCAAGCCGCGAGGAAATGACCAAGAACCAGGTGTCCC |
| | | TGACCTGCCTCGTGAAGGGCTTCTACCCTTCCGATATCGCCGTGGAATG |
| | | GGAGAGCAATGGCCAGCCTGAGAACAACTACAAGACAACCCCTCCTGTG |
| | | CTGGACAGCGACGGCTCATTCTTCCTGTACAGCAAGCTGACCGTGGACA |
| | | AGTCCAGATGGCAGCAGGGCAACGTGTTCAGCTGTAGCGTGCTGCACG |
| | | AAGCCCTGCACAGCCACTACACCCAGAAAAGCCTGTCTCTGAGCCCCGG |
| | | CAAATGATAA (SEQ ID NO: 1207) |
| | CH1-Hinge-CH2-CH3 | GCCTCTACAAAGGGCCCTAGCGTGTTCCCTCTGGCTCCTAGCAGCAAGT |
| | (cak-LS) (G1m17) | CGACATCTGGCGGAACAGCCGCTCTGGGCTGTCTGGTCAAGGACTACTT |
| | | TCCCGAGCCTGTGACAGTGTCCTGGAACTCTGGCGCTCTGACAAGCGG |
| | | CGTGCACACATTTCCAGCCGTGCTGCAAAGCAGCGGCCTGTACTCTCTG |
| | | AGCAGCGTGGTCACAGTGCCAAGCTCTAGCCTGGGCACCCAGACCTACA |
| | | TCTGCAATGTGAACCACAAGCCTAGCAACACCAAGGTGGACAAGAAGGT |
| | | GGAACCCAAGAGCTGCGACAAGACCCACACCTGTCCTCCATGTCCTGCT |
| | | CCAGAACTGCTCGGCGGACCTTCCGTGTTCCTGTTTCCTCCAAA |
| | | GCCTAAGGACACCCTGATGATCAGCAGAACCCCTGAAGTGACCT |
| | | GCGTGGTGGTGGATGTGTCTCACGAGGACCCAGAAGTGAAGTT |
| | | CAATTGGTACGTGGACGGCGTGGAAGTGCACAACGCCAAGACC |
| | | AAGCCTAGAGAGGAACAGTACAACAGCACCTACAGAGTGGTGTC |
| | | CGTGCTGACAGTGCTGCACCAGGATTGGCTGAACGGCAAAGAG |
| | | TACAAGTGCAAGGTGTCCAACAAGGCCCTGCCTGCTCCTATCGA |
| | | GAAAACCATCAGCAAGGCCAAGGGCCAGCCTAGGGAACCCCAGGTT |
| | | TACACCCTGCCTCCATGCCGCGAGGAAATGACCAAGAACCAGGTGTCCC |
| | | TGTGGTGCCTGGTCAAGGGCTTCTACCCTTCCGATATCGCCGTGGAATG |
| | | GGAGAGCAATGGCCAGCCTGAGAACAACTACAAGACAACCCCTCCTGTG |
| | | CTGGACAGCGACGGCTCATTCTTCCTGTACAGCAAGCTGACAGTGGACA |
| | | AGAGCAGATGGCAGCAGGGCAACGTGTTCAGCTGCAGCGTGCTGCATG |
| | | AAGCCCTGCACAGCCACTACACCCAGAAGTCCCTGTCTCTGAGCCCCGG |
| | | CAAGTGATAA (SEQ ID NO: 1208) |
| | CH1-Hinge-CH2 | GCCTCTACAAAGGGCCCTAGCGTGTTCCCTCTGGCTCCTAGCAGCAAGT |
| | (GAALIE)-CH3 (LS) | CGACATCTGGCGGAACAGCCGCTCTGGGCTGTCTGGTCAAGGACTACTT |
| | (G1m17) | TCCCGAGCCTGTGACAGTGTCCTGGAACTCTGGCGCTCTGACAAGCGG |
| | | CGTGCACACATTTCCAGCCGTGCTGCAAAGCAGCGGCCTGTACTCTCTG |
| | | AGCAGCGTGGTCACAGTGCCAAGCTCTAGCCTGGGCACCCAGACCTACA |
| | | TCTGCAATGTGAACCACAAGCCTAGCAACACCAAGGTGGACAAGAAGGT |
| | | GGAACCCAAGAGCTGCGACAAGACCCACACCTGTCCTCCATGTCCTGCT |
| | | CCAGAACTGCTGGCCGGACCTTCCGTGTTCCTGTTTCCTCCAAA |
| | | GCCTAAGGACACCCTGATGATCAGCAGAACCCCTGAAGTGACCT |
| | | GCGTGGTGGTGGATGTGTCTCACGAGGACCCTGAAGTGAAGTTC |
| | | AATTGGTACGTGGACGGCGTGGAAGTGCACAACGCCAAGACCA |
| | | AGCCTAGAGAGGAACAGTACAACAGCACCTACAGAGTGGTGTCC |
| | | GTGCTGACCGTGCTGCACCAGGATTGGCTGAACGGCAAAGAGT |
| | | ACAAGTGCAAGGTGTCCAACAAGGCCCTGCCTCTGCCTGAGGAA |
| | | AAGACCATCAGCAAGGCCAAGGGCCAGCCTAGGGAACCCCAGGTTT |
| | | ACACACTGCCTCCAAGCCGCGAGGAAATGACCAAGAACCAGGTGTCCCT |
| | | GACCTGCCTCGTGAAGGGCTTCTACCCTTCCGATATCGCCGTGGAATGG |
| | | GAGAGCAATGGCCAGCCTGAGAACAACTACAAGACAACCCCTCCTGTGC |
| | | TGGACAGCGACGGCTCATTCTTCCTGTACAGCAAGCTGACCGTGGACAA |
| | | GTCCAGATGGCAGCAGGGCAACGTGTTCAGCTGTAGCGTGCTGCACGA |
| | | AGCCCTGCACAGCCACTACACCCAGAAAAGCCTGTCTCTGAGCCCCGGC |
| | | AAATGATAA (SEQ ID NO: 1209) |
| | CH1-Hinge-CH2 | GCCTCTACAAAGGGCCCTAGCGTGTTCCCTCTGGCTCCTAGCAGCAAGT |
| | (GAIE)-CH3 (LS) | CGACATCTGGCGGAACAGCCGCTCTGGGCTGTCTGGTCAAGGACTACTT |
| | (G1m17) | TCCCGAGCCTGTGACAGTGTCCTGGAACTCTGGCGCTCTGACAAGCGG |
| | | CGTGCACACATTTCCAGCCGTGCTGCAAAGCAGCGGCCTGTACTCTCTG |
| | | AGCAGCGTGGTCACAGTGCCAAGCTCTAGCCTGGGCACCCAGACCTACA |
| | | TCTGCAATGTGAACCACAAGCCTAGCAACACCAAGGTGGACAAGAAGGT |
| | | GGAACCCAAGAGCTGCGACAAGACCCACACCTGTCCTCCATGTCCTGCT |
| | | CCAGAACTGCTGGCCGGACCTTCCGTGTTCCTGTTTCCTCCAAA |
| | | GCCTAAGGACACCCTGATGATCAGCAGAACCCCTGAAGTGACCT |
| | | GCGTGGTGGTGGATGTGTCTCACGAGGACCCTGAAGTGAAGTTC |
| | | AATTGGTACGTGGACGGCGTGGAAGTGCACAACGCCAAGACCA |
| | | AGCCTAGAGAGGAACAGTACAACAGCACCTACAGAGTGGTGTCC |
| | | GTGCTGACCGTGCTGCACCAGGATTGGCTGAACGGCAAAGAGT |
| | | ACAAGTGCAAGGTGTCCAACAAGGCCCTGCCTGCCCCTGAGGAA |
| | | AAGACCATCAGCAAGGCCAAGGGCCAGCCTAGGGAACCCCAGGTTT |
| | | ACACACTGCCTCCAAGCCGCGAGGAAATGACCAAGAACCAGGTGTCCCT |
| | | GACCTGCCTCGTGAAGGGCTTCTACCCTTCCGATATCGCCGTGGAATGG |
| | | GAGAGCAATGGCCAGCCTGAGAACAACTACAAGACAACCCCTCCTGTGC |
| | | TGGACAGCGACGGCTCATTCTTCCTGTACAGCAAGCTGACCGTGGACAA |
| | | GTCCAGATGGCAGCAGGGCAACGTGTTCAGCTGTAGCGTGCTGCACGA |
| | | AGCCCTGCACAGCCACTACACCCAGAAAAGCCTGTCTCTGAGCCCCGGC |
| | | AAATGATAA (SEQ ID NO: 1210) |
| | CH1-Hinge-CH2-CH3 | GCCTCTACAAAGGGCCCTAGCGTGTTCCCTCTGGCTCCTAGCAGCAAGT |
| | (G1m17,1) | CGACATCTGGCGGAACAGCCGCTCTGGGCTGTCTGGTCAAGGACTACTT |
| | | TCCCGAGCCTGTGACAGTGTCCTGGAACTCTGGCGCTCTGACAAGCGG |
| | | CGTGCACACATTTCCAGCCGTGCTGCAAAGCAGCGGCCTGTACTCTCTG |
| | | AGCAGCGTGGTCACAGTGCCAAGCTCTAGCCTGGGCACCCAGACCTACA |
| | | TCTGCAATGTGAACCACAAGCCTAGCAACACCAAGGTGGACAAGAAGGT |
| | | GGAACCCAAGAGCTGCGACAAGACCCACACCTGTCCTCCATGTCCTGCT |
| | | CCAGAACTGCTCGGCGGACCTTCCGTGTTCCTGTTTCCTCCAAA |
| | | GCCTAAGGACACCCTGATGATCAGCAGAACCCCTGAAGTGACCT |
| | | GCGTGGTGGTGGATGTGTCTCACGAGGACCCAGAAGTGAAGTT |
| | | CAATTGGTACGTGGACGGCGTGGAAGTGCACAACGCCAAGACC |
| | | AAGCCTAGAGAGGAACAGTACAACAGCACCTACAGAGTGGTGTC |
| | | CGTGCTGACAGTGCTGCACCAGGATTGGCTGAACGGCAAAGAG |
| | | TACAAGTGCAAGGTGTCCAACAAGGCCCTGCCTGCTCCTATCGA |
| | | GAAAACCATCAGCAAGGCCAAGGGCCAGCCTAGGGAACCCCAGGTT |
| | | TACACACTGCCTCCAAGCCGCGACGAACTGACCAAGAACCAGGTGTCCC |
| | | TGACCTGCCTCGTGAAGGGCTTCTACCCTTCCGATATCGCCGTGGAATG |
| | | GGAGAGCAATGGCCAGCCTGAGAACAACTACAAGACAACCCCTCCTGTG |
| | | CTGGACAGCGACGGCTCATTCTTCCTGTACAGCAAGCTGACTGTGGATA |
| | | AGTCCCGGTGGCAGCAGGGCAACGTGTTCAGCTGTTCTGTGATGCACG |
| | | AAGCCCTGCACAACCACTACACCCAGAAAAGCCTGTCTCTGAGCCCCGG |
| | | CAAGTGATAA (SEQ ID NO: 1211) |
| | CH1-Hinge-CH2-CH3 | GCCTCTACAAAGGGCCCTAGCGTGTTCCCTCTGGCTCCTAGCAGCAAGT |
| | (LS) (G1m17,1) | CGACATCTGGCGGAACAGCCGCTCTGGGCTGTCTGGTCAAGGACTACTT |
| | | TCCCGAGCCTGTGACAGTGTCCTGGAACTCTGGCGCTCTGACAAGCGG |
| | | CGTGCACACATTTCCAGCCGTGCTGCAAAGCAGCGGCCTGTACTCTCTG |
| | | AGCAGCGTGGTCACAGTGCCAAGCTCTAGCCTGGGCACCCAGACCTACA |
| | | TCTGCAATGTGAACCACAAGCCTAGCAACACCAAGGTGGACAAGAAGGT |
| | | GGAACCCAAGAGCTGCGACAAGACCCACACCTGTCCTCCATGTCCTGCT |
| | | CCAGAACTGCTCGGCGGACCTTCCGTGTTCCTGTTTCCTCCAAA |
| | | GCCTAAGGACACCCTGATGATCAGCAGAACCCCTGAAGTGACCT |
| | | GCGTGGTGGTGGATGTGTCTCACGAGGACCCAGAAGTGAAGTT |
| | | CAATTGGTACGTGGACGGCGTGGAAGTGCACAACGCCAAGACC |
| | | AAGCCTAGAGAGGAACAGTACAACAGCACCTACAGAGTGGTGTC |
| | | CGTGCTGACAGTGCTGCACCAGGATTGGCTGAACGGCAAAGAG |
| | | TACAAGTGCAAGGTGTCCAACAAGGCCCTGCCTGCTCCTATCGA |
| | | GAAAACCATCAGCAAGGCCAAGGGCCAGCCTAGGGAACCCCAGGTT |
| | | TACACACTGCCTCCAAGCCGCGACGAACTGACCAAGAACCAGGTGTCCC |
| | | TGACCTGCCTCGTGAAGGGCTTCTACCCTTCCGATATCGCCGTGGAATG |
| | | GGAGAGCAATGGCCAGCCTGAGAACAACTACAAGACAACCCCTCCTGTG |
| | | CTGGACAGCGACGGCTCATTCTTCCTGTACAGCAAGCTGACCGTGGACA |
| | | AGTCCAGATGGCAGCAGGGCAACGTGTTCAGCTGTAGCGTGCTGCACG |
| | | AAGCCCTGCACAGCCACTACACCCAGAAAAGCCTGTCTCTGAGCCCCGG |
| | | CAAATGATAA (SEQ ID NO: 1212) |
| | CH1-Hinge-CH2-CH3 | GCCTCTACAAAGGGCCCTAGCGTGTTCCCTCTGGCTCCTAGCAGCAAGT |
| | (cak-LS) (G1m17,1) | CGACATCTGGCGGAACAGCCGCTCTGGGCTGTCTGGTCAAGGACTACTT |
| | | TCCCGAGCCTGTGACAGTGTCCTGGAACTCTGGCGCTCTGACAAGCGG |
| | | CGTGCACACATTTCCAGCCGTGCTGCAAAGCAGCGGCCTGTACTCTCTG |
| | | AGCAGCGTGGTCACAGTGCCAAGCTCTAGCCTGGGCACCCAGACCTACA |
| | | TCTGCAATGTGAACCACAAGCCTAGCAACACCAAGGTGGACAAGAAGGT |
| | | GGAACCCAAGAGCTGCGACAAGACCCACACCTGTCCTCCATGTCCTGCT |
| | | CCAGAACTGCTCGGCGGACCTTCCGTGTTCCTGTTTCCTCCAAA |
| | | GCCTAAGGACACCCTGATGATCAGCAGAACCCCTGAAGTGACCT |
| | | GCGTGGTGGTGGATGTGTCTCACGAGGACCCAGAAGTGAAGTT |
| | | CAATTGGTACGTGGACGGCGTGGAAGTGCACAACGCCAAGACC |
| | | AAGCCTAGAGAGGAACAGTACAACAGCACCTACAGAGTGGTGTC |
| | | CGTGCTGACAGTGCTGCACCAGGATTGGCTGAACGGCAAAGAG |
| | | TACAAGTGCAAGGTGTCCAACAAGGCCCTGCCTGCTCCTATCGA |
| | | GAAAACCATCAGCAAGGCCAAGGGCCAGCCTAGGGAACCCCAGGTT |
| | | TACACCCTGCCTCCATGCCGCGACGAACTGACCAAGAACCAGGTGTCCC |
| | | TGTGGTGCCTGGTCAAGGGCTTCTACCCTTCCGATATCGCCGTGGAATG |
| | | GGAGAGCAATGGCCAGCCTGAGAACAACTACAAGACAACCCCTCCTGTG |
| | | CTGGACAGCGACGGCTCATTCTTCCTGTACAGCAAGCTGACAGTGGACA |
| | | AGAGCAGATGGCAGCAGGGCAACGTGTTCAGCTGCAGCGTGCTGCATG |
| | | AAGCCCTGCACAGCCACTACACCCAGAAGTCCCTGTCTCTGAGCCCCGG |
| | | CAAGTGATAA (SEQ ID NO: 1213) |
| | CH1-Hinge-CH2 | GCCTCTACAAAGGGCCCTAGCGTGTTCCCTCTGGCTCCTAGCAGCAAGT |
| | (GAALIE)-CH3 (LS) | CGACATCTGGCGGAACAGCCGCTCTGGGCTGTCTGGTCAAGGACTACTT |
| | (G1m17,1) | TCCCGAGCCTGTGACAGTGTCCTGGAACTCTGGCGCTCTGACAAGCGG |
| | | CGTGCACACATTTCCAGCCGTGCTGCAAAGCAGCGGCCTGTACTCTCTG |
| | | AGCAGCGTGGTCACAGTGCCAAGCTCTAGCCTGGGCACCCAGACCTACA |
| | | TCTGCAATGTGAACCACAAGCCTAGCAACACCAAGGTGGACAAGAAGGT |
| | | GGAACCCAAGAGCTGCGACAAGACCCACACCTGTCCTCCATGTCCTGCT |
| | | CCAGAACTGCTGGCCGGACCTTCCGTGTTCCTGTTTCCTCCAAA |
| | | GCCTAAGGACACCCTGATGATCAGCAGAACCCCTGAAGTGACCT |
| | | GCGTGGTGGTGGATGTGTCTCACGAGGACCCTGAAGTGAAGTTC |
| | | AATTGGTACGTGGACGGCGTGGAAGTGCACAACGCCAAGACCA |
| | | AGCCTAGAGAGGAACAGTACAACAGCACCTACAGAGTGGTGTCC |
| | | GTGCTGACCGTGCTGCACCAGGATTGGCTGAACGGCAAAGAGT |
| | | ACAAGTGCAAGGTGTCCAACAAGGCCCTGCCTCTGCCTGAGGAA |
| | | AAGACCATCAGCAAGGCCAAGGGCCAGCCTAGGGAACCCCAGGTTT |
| | | ACACACTGCCTCCAAGCCGCGACGAACTGACCAAGAACCAGGTGTCCCT |
| | | GACCTGCCTCGTGAAGGGCTTCTACCCTTCCGATATCGCCGTGGAATGG |
| | | GAGAGCAATGGCCAGCCTGAGAACAACTACAAGACAACCCCTCCTGTGC |
| | | TGGACAGCGACGGCTCATTCTTCCTGTACAGCAAGCTGACCGTGGACAA |
| | | GTCCAGATGGCAGCAGGGCAACGTGTTCAGCTGTAGCGTGCTGCACGA |
| | | AGCCCTGCACAGCCACTACACCCAGAAAAGCCTGTCTCTGAGCCCCGGC |
| | | AAATGATAA (SEQ ID NO: 1214) |
| | CH1-Hinge-CH2 | GCCTCTACAAAGGGCCCTAGCGTGTTCCCTCTGGCTCCTAGCAGCAAGT |
| | (GAIE)-CH3 (LS) | CGACATCTGGCGGAACAGCCGCTCTGGGCTGTCTGGTCAAGGACTACTT |
| | (G1m17,1) | TCCCGAGCCTGTGACAGTGTCCTGGAACTCTGGCGCTCTGACAAGCGG |
| | | CGTGCACACATTTCCAGCCGTGCTGCAAAGCAGCGGCCTGTACTCTCTG |
| | | AGCAGCGTGGTCACAGTGCCAAGCTCTAGCCTGGGCACCCAGACCTACA |
| | | TCTGCAATGTGAACCACAAGCCTAGCAACACCAAGGTGGACAAGAAGGT |
| | | GGAACCCAAGAGCTGCGACAAGACCCACACCTGTCCTCCATGTCCTGCT |
| | | CCAGAACTGCTGGCCGGACCTTCCGTGTTCCTGTTTCCTCCAAA |
| | | GCCTAAGGACACCCTGATGATCAGCAGAACCCCTGAAGTGACCT |
| | | GCGTGGTGGTGGATGTGTCTCACGAGGACCCTGAAGTGAAGTTC |
| | | AATTGGTACGTGGACGGCGTGGAAGTGCACAACGCCAAGACCA |
| | | AGCCTAGAGAGGAACAGTACAACAGCACCTACAGAGTGGTGTCC |
| | | GTGCTGACCGTGCTGCACCAGGATTGGCTGAACGGCAAAGAGT |
| | | ACAAGTGCAAGGTGTCCAACAAGGCCCTGCCTGCCCCTGAGGAA |
| | | AAGACCATCAGCAAGGCCAAGGGCCAGCCTAGGGAACCCCAGGTTT |
| | | ACACACTGCCTCCAAGCCGCGACGAACTGACCAAGAACCAGGTGTCCCT |
| | | GACCTGCCTCGTGAAGGGCTTCTACCCTTCCGATATCGCCGTGGAATGG |
| | | GAGAGCAATGGCCAGCCTGAGAACAACTACAAGACAACCCCTCCTGTGC |
| | | TGGACAGCGACGGCTCATTCTTCCTGTACAGCAAGCTGACCGTGGACAA |
| | | GTCCAGATGGCAGCAGGGCAACGTGTTCAGCTGTAGCGTGCTGCACGA |
| | | AGCCCTGCACAGCCACTACACCCAGAAAAGCCTGTCTCTGAGCCCCGGC |
| | | AAATGATAA (SEQ ID NO: 1215) |
| | CH1-Hinge-CH2(GA)- | GCCTCTACAAAGGGCCCTAGCGTGTTCCCTCTGGCTCCTAGCAGCAAGT |
| | CH3 (LS) (G1m3) | CGACATCTGGCGGAACAGCCGCTCTGGGCTGTCTGGTCAAGGACTACTT |
| | | TCCCGAGCCTGTGACAGTGTCCTGGAACTCTGGCGCTCTGACAAGCGG |
| | | CGTGCACACATTTCCAGCCGTGCTGCAAAGCAGCGGCCTGTACTCTCTG |
| | | AGCAGCGTGGTCACAGTGCCAAGCTCTAGCCTGGGCACCCAGACCTACA |
| | | TCTGCAATGTGAACCACAAGCCTAGCAACACCAAGGTGGACAAGAGAGT |
| | | GGAACCCAAGAGCTGCGACAAGACCCACACCTGTCCTCCATGTCCTGCT |
| | | CCAGAACTGCTGGCCGGACCTTCCGTGTTCCTGTTTCCTCCAAA |
| | | GCCTAAGGACACCCTGATGATCAGCAGAACCCCTGAAGTGACCT |
| | | GCGTGGTGGTGGATGTGTCTCACGAGGACCCTGAAGTGAAGTTC |
| | | AATTGGTACGTGGACGGCGTGGAAGTGCACAACGCCAAGACCA |
| | | AGCCTAGAGAGGAACAGTACAACAGCACCTACAGAGTGGTGTCC |
| | | GTGCTGACCGTGCTGCACCAGGATTGGCTGAACGGCAAAGAGT |
| | | ACAAGTGCAAGGTGTCCAACAAGGCCCTGCCTGCCCCTATCGAA |
| | | AAGACCATCAGCAAGGCCAAGGGCCAGCCTAGGGAACCCCAGGTTT |
| | | ACACACTGCCTCCAAGCCGCGAGGAAATGACCAAGAACCAGGTGTCCCT |
| | | GACCTGCCTCGTGAAGGGCTTCTACCCTTCCGATATCGCCGTGGAATGG |
| | | GAGAGCAATGGCCAGCCTGAGAACAACTACAAGACAACCCCTCCTGTGC |
| | | TGGACAGCGACGGCTCATTCTTCCTGTACAGCAAGCTGACCGTGGACAA |
| | | GTCCAGATGGCAGCAGGGCAACGTGTTCAGCTGTAGCGTGCTGCACGA |
| | | AGCCCTGCACAGCCACTACACCCAGAAAAGCCTGTCTCTGAGCCCCGGC |
| | | AAATGATAA (SEQ ID NO: 1216) |
| | CH1-Hinge-CH2(IE)- | GCCTCTACAAAGGGCCCTAGCGTGTTCCCTCTGGCTCCTAGCAGCAAGT |
| | CH3 (LS) (G1m3) | CGACATCTGGCGGAACAGCCGCTCTGGGCTGTCTGGTCAAGGACTACTT |
| | | TCCCGAGCCTGTGACAGTGTCCTGGAACTCTGGCGCTCTGACAAGCGG |
| | | CGTGCACACATTTCCAGCCGTGCTGCAAAGCAGCGGCCTGTACTCTCTG |
| | | AGCAGCGTGGTCACAGTGCCAAGCTCTAGCCTGGGCACCCAGACCTACA |
| | | TCTGCAATGTGAACCACAAGCCTAGCAACACCAAGGTGGACAAGAGAGT |
| | | GGAACCCAAGAGCTGCGACAAGACCCACACCTGTCCTCCATGTCCTGCT |
| | | CCAGAACTGCTGGGCGGACCTTCCGTGTTCCTGTTTCCTCCAAA |
| | | GCCTAAGGACACCCTGATGATCAGCAGAACCCCTGAAGTGACCT |
| | | GCGTGGTGGTGGATGTGTCTCACGAGGACCCTGAAGTGAAGTTC |
| | | AATTGGTACGTGGACGGCGTGGAAGTGCACAACGCCAAGACCA |
| | | AGCCTAGAGAGGAACAGTACAACAGCACCTACAGAGTGGTGTCC |
| | | GTGCTGACCGTGCTGCACCAGGATTGGCTGAACGGCAAAGAGT |
| | | ACAAGTGCAAGGTGTCCAACAAGGCCCTGCCTGCCCCTGAGGAA |
| | | AAGACCATCAGCAAGGCCAAGGGCCAGCCTAGGGAACCCCAGGTTT |
| | | ACACACTGCCTCCAAGCCGCGAGGAAATGACCAAGAACCAGGTGTCCCT |
| | | GACCTGCCTCGTGAAGGGCTTCTACCCTTCCGATATCGCCGTGGAATGG |
| | | GAGAGCAATGGCCAGCCTGAGAACAACTACAAGACAACCCCTCCTGTGC |
| | | TGGACAGCGACGGCTCATTCTTCCTGTACAGCAAGCTGACCGTGGACAA |
| | | GTCCAGATGGCAGCAGGGCAACGTGTTCAGCTGTAGCGTGCTGCACGA |
| | | AGCCCTGCACAGCCACTACACCCAGAAAAGCCTGTCTCTGAGCCCCGGC |
| | | AAATGATAA (SEQ ID NO: 1217) |
| | CH1-Hinge-CH2-CH3 | GCCTCTACAAAGGGCCCTAGCGTGTTCCCTCTGGCTCCTAGCAGCAAGT |
| | (cah-LS) (G1m3) | CGACATCTGGCGGAACAGCCGCTCTGGGCTGTCTGGTCAAGGACTACTT |
| | | TCCCGAGCCTGTGACAGTGTCCTGGAACTCTGGCGCTCTGACAAGCGG |
| | | CGTGCACACATTTCCAGCCGTGCTGCAAAGCAGCGGCCTGTACTCTCTG |
| | | AGCAGCGTGGTCACAGTGCCAAGCTCTAGCCTGGGCACCCAGACCTACA |
| | | TCTGCAATGTGAACCACAAGCCTAGCAACACCAAGGTGGACAAGAGAGT |
| | | GGAACCCAAGAGCTGCGACAAGACCCACACCTGTCCTCCATGTCCTGCT |
| | | CCAGAACTGCTCGGCGGACCTTCCGTGTTCCTGTTTCCTCCAAA |
| | | GCCTAAGGACACCCTGATGATCAGCAGAACCCCTGAAGTGACCT |
| | | GCGTGGTGGTGGATGTGTCTCACGAGGACCCAGAAGTGAAGTT |
| | | CAATTGGTACGTGGACGGCGTGGAAGTGCACAACGCCAAGACC |
| | | AAGCCTAGAGAGGAACAGTACAACAGCACCTACAGAGTGGTGTC |
| | | CGTGCTGACAGTGCTGCACCAGGATTGGCTGAACGGCAAAGAG |
| | | TACAAGTGCAAGGTGTCCAACAAGGCCCTGCCTGCTCCTATCGA |
| | | GAAAACCATCAGCAAGGCCAAGGGCCAGCCTCGCGAACCTCAAGTC |
| | | TGTACACTGCCTCCTAGCCGCGAGGAAATGACCAAGAACCAGGTGTCCC |
| | | TGAGCTGCGCCGTGAAGGGCTTTTACCCTTCCGATATCGCCGTGGAATG |
| | | GGAGAGCAATGGCCAGCCTGAGAACAACTACAAGACAACCCCTCCTGTG |
| | | CTGGACAGCGACGGCTCATTCTTCCTGGTGTCCAAGCTGACAGTGGACA |
| | | AGAGCAGATGGCAGCAGGGCAACGTGTTCAGCTGCAGCGTGCTGCATG |
| | | AAGCCCTGCACAGCCACTACACCCAGAAGTCCCTGTCTCTGAGCCCCGG |
| | | CAAGTGATAA (SEQ ID NO: 1218) |
| | CH1-Hinge- | GCCTCTACAAAGGGCCCTAGCGTGTTCCCTCTGGCTCCTAGCAGCAAGT |
| | CH2(GAALIE)-CH3 | CGACATCTGGCGGAACAGCCGCTCTGGGCTGTCTGGTCAAGGACTACTT |
| | (cah-LS) (G1m3) | TCCCGAGCCTGTGACAGTGTCCTGGAACTCTGGCGCTCTGACAAGCGG |
| | | CGTGCACACATTTCCAGCCGTGCTGCAAAGCAGCGGCCTGTACTCTCTG |
| | | AGCAGCGTGGTCACAGTGCCAAGCTCTAGCCTGGGCACCCAGACCTACA |
| | | TCTGCAATGTGAACCACAAGCCTAGCAACACCAAGGTGGACAAGAGAGT |
| | | GGAACCCAAGAGCTGCGACAAGACCCACACCTGTCCTCCATGTCCTGCT |
| | | CCAGAACTGCTGGCCGGACCTTCCGTGTTCCTGTTTCCTCCAAA |
| | | GCCTAAGGACACCCTGATGATCAGCAGAACCCCTGAAGTGACCT |
| | | GCGTGGTGGTGGATGTGTCTCACGAGGACCCTGAAGTGAAGTTC |
| | | AATTGGTACGTGGACGGCGTGGAAGTGCACAACGCCAAGACCA |
| | | AGCCTAGAGAGGAACAGTACAACAGCACCTACAGAGTGGTGTCC |
| | | GTGCTGACCGTGCTGCACCAGGATTGGCTGAACGGCAAAGAGT |
| | | ACAAGTGCAAGGTGTCCAACAAGGCCCTGCCTCTGCCTGAGGAA |
| | | AAGACCATCAGCAAGGCCAAGGGCCAGCCTCGCGAACCTCAAGTCT |
| | | GTACACTGCCTCCTAGCCGCGAGGAAATGACCAAGAACCAGGTGTCCCT |
| | | GAGCTGCGCCGTGAAGGGCTTTTACCCTTCCGATATCGCCGTGGAATG |
| | | GGAGAGCAATGGCCAGCCTGAGAACAACTACAAGACAACCCCTCCTGTG |
| | | CTGGACAGCGACGGCTCATTCTTCCTGGTGTCCAAGCTGACAGTGGACA |
| | | AGAGCAGATGGCAGCAGGGCAACGTGTTCAGCTGCAGCGTGCTGCATG |
| | | AAGCCCTGCACAGCCACTACACCCAGAAGTCCCTGTCTCTGAGCCCCGG |
| | | CAAGTGATAA (SEQ ID NO: 1219) |
| | CH1-Hinge- | GCCTCTACAAAGGGCCCTAGCGTGTTCCCTCTGGCTCCTAGCAGCAAGT |
| | CH2(GAIE)-CH3 (cah- | CGACATCTGGCGGAACAGCCGCTCTGGGCTGTCTGGTCAAGGACTACTT |
| | LS) (G1m3) | TCCCGAGCCTGTGACAGTGTCCTGGAACTCTGGCGCTCTGACAAGCGG |
| | | CGTGCACACATTTCCAGCCGTGCTGCAAAGCAGCGGCCTGTACTCTCTG |
| | | AGCAGCGTGGTCACAGTGCCAAGCTCTAGCCTGGGCACCCAGACCTACA |
| | | TCTGCAATGTGAACCACAAGCCTAGCAACACCAAGGTGGACAAGAGAGT |
| | | GGAACCCAAGAGCTGCGACAAGACCCACACCTGTCCTCCATGTCCTGCT |
| | | CCAGAACTGCTGGCCGGACCTTCCGTGTTCCTGTTTCCTCCAAA |
| | | GCCTAAGGACACCCTGATGATCAGCAGAACCCCTGAAGTGACCT |
| | | GCGTGGTGGTGGATGTGTCTCACGAGGACCCTGAAGTGAAGTTC |
| | | AATTGGTACGTGGACGGCGTGGAAGTGCACAACGCCAAGACCA |
| | | AGCCTAGAGAGGAACAGTACAACAGCACCTACAGAGTGGTGTCC |
| | | GTGCTGACCGTGCTGCACCAGGATTGGCTGAACGGCAAAGAGT |
| | | ACAAGTGCAAGGTGTCCAACAAGGCCCTGCCTGCCCCTGAGGAA |
| | | AAGACCATCAGCAAGGCCAAGGGCCAGCCTCGCGAACCTCAAGTCT |
| | | GTACACTGCCTCCTAGCCGCGAGGAAATGACCAAGAACCAGGTGTCCCT |
| | | GAGCTGCGCCGTGAAGGGCTTTTACCCTTCCGATATCGCCGTGGAATG |
| | | GGAGAGCAATGGCCAGCCTGAGAACAACTACAAGACAACCCCTCCTGTG |
| | | CTGGACAGCGACGGCTCATTCTTCCTGGTGTCCAAGCTGACAGTGGACA |
| | | AGAGCAGATGGCAGCAGGGCAACGTGTTCAGCTGCAGCGTGCTGCATG |
| | | AAGCCCTGCACAGCCACTACACCCAGAAGTCCCTGTCTCTGAGCCCCGG |
| | | CAAGTGATAA (SEQ ID NO: 1220) |
| | CH1-Hinge- | GCCTCTACAAAGGGCCCTAGCGTGTTCCCTCTGGCTCCTAGCAGCAAGT |
| | CH2(GAALIE)-CH3 | CGACATCTGGCGGAACAGCCGCTCTGGGCTGTCTGGTCAAGGACTACTT |
| | (cak-LS) (G1m3) | TCCCGAGCCTGTGACAGTGTCCTGGAACTCTGGCGCTCTGACAAGCGG |
| | | CGTGCACACATTTCCAGCCGTGCTGCAAAGCAGCGGCCTGTACTCTCTG |
| | | AGCAGCGTGGTCACAGTGCCAAGCTCTAGCCTGGGCACCCAGACCTACA |
| | | TCTGCAATGTGAACCACAAGCCTAGCAACACCAAGGTGGACAAGAGAGT |
| | | GGAACCCAAGAGCTGCGACAAGACCCACACCTGTCCTCCATGTCCTGCT |
| | | CCAGAACTGCTGGCCGGACCTTCCGTGTTCCTGTTTCCTCCAAA |
| | | GCCTAAGGACACCCTGATGATCAGCAGAACCCCTGAAGTGACCT |
| | | GCGTGGTGGTGGATGTGTCTCACGAGGACCCTGAAGTGAAGTTC |
| | | AATTGGTACGTGGACGGCGTGGAAGTGCACAACGCCAAGACCA |
| | | AGCCTAGAGAGGAACAGTACAACAGCACCTACAGAGTGGTGTCC |
| | | GTGCTGACCGTGCTGCACCAGGATTGGCTGAACGGCAAAGAGT |
| | | ACAAGTGCAAGGTGTCCAACAAGGCCCTGCCTCTGCCTGAGGAA |
| | | AAGACCATCAGCAAGGCCAAGGGCCAGCCTAGGGAACCCCAGGTTT |
| | | ACACCCTGCCTCCATGCCGCGAGGAAATGACCAAGAACCAGGTGTCCCT |
| | | GTGGTGCCTGGTCAAGGGCTTCTACCCTTCCGATATCGCCGTGGAATG |
| | | GGAGAGCAATGGCCAGCCTGAGAACAACTACAAGACAACCCCTCCTGTG |
| | | CTGGACAGCGACGGCTCATTCTTCCTGTACAGCAAGCTGACAGTGGACA |
| | | AGAGCAGATGGCAGCAGGGCAACGTGTTCAGCTGCAGCGTGCTGCATG |
| | | AAGCCCTGCACAGCCACTACACCCAGAAGTCCCTGTCTCTGAGCCCCGG |
| | | CAAGTGATAA (SEQ ID NO: 1221) |
| | CH1-Hinge- | GCCTCTACAAAGGGCCCTAGCGTGTTCCCTCTGGCTCCTAGCAGCAAGT |
| | CH2(GAIE)-CH3 (cak- | CGACATCTGGCGGAACAGCCGCTCTGGGCTGTCTGGTCAAGGACTACTT |
| | LS) (G1m3) | TCCCGAGCCTGTGACAGTGTCCTGGAACTCTGGCGCTCTGACAAGCGG |
| | | CGTGCACACATTTCCAGCCGTGCTGCAAAGCAGCGGCCTGTACTCTCTG |
| | | AGCAGCGTGGTCACAGTGCCAAGCTCTAGCCTGGGCACCCAGACCTACA |
| | | TCTGCAATGTGAACCACAAGCCTAGCAACACCAAGGTGGACAAGAGAGT |
| | | GGAACCCAAGAGCTGCGACAAGACCCACACCTGTCCTCCATGTCCTGCT |
| | | CCAGAACTGCTGGCCGGACCTTCCGTGTTCCTGTTTCCTCCAAA |
| | | GCCTAAGGACACCCTGATGATCAGCAGAACCCCTGAAGTGACCT |
| | | GCGTGGTGGTGGATGTGTCTCACGAGGACCCTGAAGTGAAGTTC |
| | | AATTGGTACGTGGACGGCGTGGAAGTGCACAACGCCAAGACCA |
| | | AGCCTAGAGAGGAACAGTACAACAGCACCTACAGAGTGGTGTCC |
| | | GTGCTGACCGTGCTGCACCAGGATTGGCTGAACGGCAAAGAGT |
| | | ACAAGTGCAAGGTGTCCAACAAGGCCCTGCCTGCCCCTGAGGAA |
| | | AAGACCATCAGCAAGGCCAAGGGCCAGCCTAGGGAACCCCAGGTTT |
| | | ACACCCTGCCTCCATGCCGCGAGGAAATGACCAAGAACCAGGTGTCCCT |
| | | GTGGTGCCTGGTCAAGGGCTTCTACCCTTCCGATATCGCCGTGGAATG |
| | | GGAGAGCAATGGCCAGCCTGAGAACAACTACAAGACAACCCCTCCTGTG |
| | | CTGGACAGCGACGGCTCATTCTTCCTGTACAGCAAGCTGACAGTGGACA |
| | | AGAGCAGATGGCAGCAGGGCAACGTGTTCAGCTGCAGCGTGCTGCATG |
| | | AAGCCCTGCACAGCCACTACACCCAGAAGTCCCTGTCTCTGAGCCCCGG |
| | | CAAGTGATAA (SEQ ID NO: 1222) |
| | CH1-Hinge-CH2(GA)- | GCCTCTACAAAGGGCCCTAGCGTGTTCCCTCTGGCTCCTAGCAGCAAGT |
| | CH3 (LS) (G1m17) | CGACATCTGGCGGAACAGCCGCTCTGGGCTGTCTGGTCAAGGACTACTT |
| | | TCCCGAGCCTGTGACAGTGTCCTGGAACTCTGGCGCTCTGACAAGCGG |
| | | CGTGCACACATTTCCAGCCGTGCTGCAAAGCAGCGGCCTGTACTCTCTG |
| | | AGCAGCGTGGTCACAGTGCCAAGCTCTAGCCTGGGCACCCAGACCTACA |
| | | TCTGCAATGTGAACCACAAGCCTAGCAACACCAAGGTGGACAAGAAGGT |
| | | GGAACCCAAGAGCTGCGACAAGACCCACACCTGTCCTCCATGTCCTGCT |
| | | CCAGAACTGCTGGCCGGACCTTCCGTGTTCCTGTTTCCTCCAAA |
| | | GCCTAAGGACACCCTGATGATCAGCAGAACCCCTGAAGTGACCT |
| | | GCGTGGTGGTGGATGTGTCTCACGAGGACCCTGAAGTGAAGTTC |
| | | AATTGGTACGTGGACGGCGTGGAAGTGCACAACGCCAAGACCA |
| | | AGCCTAGAGAGGAACAGTACAACAGCACCTACAGAGTGGTGTCC |
| | | GTGCTGACCGTGCTGCACCAGGATTGGCTGAACGGCAAAGAGT |
| | | ACAAGTGCAAGGTGTCCAACAAGGCCCTGCCTGCCCCTATCGAA |
| | | AAGACCATCAGCAAGGCCAAGGGCCAGCCTAGGGAACCCCAGGTTT |
| | | ACACACTGCCTCCAAGCCGCGAGGAAATGACCAAGAACCAGGTGTCCCT |
| | | GACCTGCCTCGTGAAGGGCTTCTACCCTTCCGATATCGCCGTGGAATGG |
| | | GAGAGCAATGGCCAGCCTGAGAACAACTACAAGACAACCCCTCCTGTGC |
| | | TGGACAGCGACGGCTCATTCTTCCTGTACAGCAAGCTGACCGTGGACAA |
| | | GTCCAGATGGCAGCAGGGCAACGTGTTCAGCTGTAGCGTGCTGCACGA |
| | | AGCCCTGCACAGCCACTACACCCAGAAAAGCCTGTCTCTGAGCCCCGGC |
| | | AAATGATAA (SEQ ID NO: 1223) |
| | CH1-Hinge-CH2(IE)- | GCCTCTACAAAGGGCCCTAGCGTGTTCCCTCTGGCTCCTAGCAGCAAGT |
| | CH3 (LS) (G1m17) | CGACATCTGGCGGAACAGCCGCTCTGGGCTGTCTGGTCAAGGACTACTT |
| | | TCCCGAGCCTGTGACAGTGTCCTGGAACTCTGGCGCTCTGACAAGCGG |
| | | CGTGCACACATTTCCAGCCGTGCTGCAAAGCAGCGGCCTGTACTCTCTG |
| | | AGCAGCGTGGTCACAGTGCCAAGCTCTAGCCTGGGCACCCAGACCTACA |
| | | TCTGCAATGTGAACCACAAGCCTAGCAACACCAAGGTGGACAAGAAGGT |
| | | GGAACCCAAGAGCTGCGACAAGACCCACACCTGTCCTCCATGTCCTGCT |
| | | CCAGAACTGCTGGGCGGACCTTCCGTGTTCCTGTTTCCTCCAAA |
| | | GCCTAAGGACACCCTGATGATCAGCAGAACCCCTGAAGTGACCT |
| | | GCGTGGTGGTGGATGTGTCTCACGAGGACCCTGAAGTGAAGTTC |
| | | AATTGGTACGTGGACGGCGTGGAAGTGCACAACGCCAAGACCA |
| | | AGCCTAGAGAGGAACAGTACAACAGCACCTACAGAGTGGTGTCC |
| | | GTGCTGACCGTGCTGCACCAGGATTGGCTGAACGGCAAAGAGT |
| | | ACAAGTGCAAGGTGTCCAACAAGGCCCTGCCTGCCCCTGAGGAA |
| | | AAGACCATCAGCAAGGCCAAGGGCCAGCCTAGGGAACCCCAGGTTT |
| | | ACACACTGCCTCCAAGCCGCGAGGAAATGACCAAGAACCAGGTGTCCCT |
| | | GACCTGCCTCGTGAAGGGCTTCTACCCTTCCGATATCGCCGTGGAATGG |
| | | GAGAGCAATGGCCAGCCTGAGAACAACTACAAGACAACCCCTCCTGTGC |
| | | TGGACAGCGACGGCTCATTCTTCCTGTACAGCAAGCTGACCGTGGACAA |
| | | GTCCAGATGGCAGCAGGGCAACGTGTTCAGCTGTAGCGTGCTGCACGA |
| | | AGCCCTGCACAGCCACTACACCCAGAAAAGCCTGTCTCTGAGCCCCGGC |
| | | AAATGATAA (SEQ ID NO: 1224) |
| | CH1-Hinge-CH2-CH3 | GCCTCTACAAAGGGCCCTAGCGTGTTCCCTCTGGCTCCTAGCAGCAAGT |
| | (cah-LS) (G1m17) | CGACATCTGGCGGAACAGCCGCTCTGGGCTGTCTGGTCAAGGACTACTT |
| | | TCCCGAGCCTGTGACAGTGTCCTGGAACTCTGGCGCTCTGACAAGCGG |
| | | CGTGCACACATTTCCAGCCGTGCTGCAAAGCAGCGGCCTGTACTCTCTG |
| | | AGCAGCGTGGTCACAGTGCCAAGCTCTAGCCTGGGCACCCAGACCTACA |
| | | TCTGCAATGTGAACCACAAGCCTAGCAACACCAAGGTGGACAAGAAGGT |
| | | GGAACCCAAGAGCTGCGACAAGACCCACACCTGTCCTCCATGTCCTGCT |
| | | CCAGAACTGCTCGGCGGACCTTCCGTGTTCCTGTTTCCTCCAAA |
| | | GCCTAAGGACACCCTGATGATCAGCAGAACCCCTGAAGTGACCT |
| | | GCGTGGTGGTGGATGTGTCTCACGAGGACCCAGAAGTGAAGTT |
| | | CAATTGGTACGTGGACGGCGTGGAAGTGCACAACGCCAAGACC |
| | | AAGCCTAGAGAGGAACAGTACAACAGCACCTACAGAGTGGTGTC |
| | | CGTGCTGACAGTGCTGCACCAGGATTGGCTGAACGGCAAAGAG |
| | | TACAAGTGCAAGGTGTCCAACAAGGCCCTGCCTGCTCCTATCGA |
| | | GAAAACCATCAGCAAGGCCAAGGGCCAGCCTCGCGAACCTCAAGTC |
| | | TGTACACTGCCTCCTAGCCGCGAGGAAATGACCAAGAACCAGGTGTCCC |
| | | TGAGCTGCGCCGTGAAGGGCTTTTACCCTTCCGATATCGCCGTGGAATG |
| | | GGAGAGCAATGGCCAGCCTGAGAACAACTACAAGACAACCCCTCCTGTG |
| | | CTGGACAGCGACGGCTCATTCTTCCTGGTGTCCAAGCTGACAGTGGACA |
| | | AGAGCAGATGGCAGCAGGGCAACGTGTTCAGCTGCAGCGTGCTGCATG |
| | | AAGCCCTGCACAGCCACTACACCCAGAAGTCCCTGTCTCTGAGCCCCGG |
| | | CAAGTGATAA (SEQ ID NO: 1225) |
| | CH1-Hinge- | GCCTCTACAAAGGGCCCTAGCGTGTTCCCTCTGGCTCCTAGCAGCAAGT |
| | CH2(GAALIE)-CH3 | CGACATCTGGCGGAACAGCCGCTCTGGGCTGTCTGGTCAAGGACTACTT |
| | (cah-LS) (G1m17) | TCCCGAGCCTGTGACAGTGTCCTGGAACTCTGGCGCTCTGACAAGCGG |
| | | CGTGCACACATTTCCAGCCGTGCTGCAAAGCAGCGGCCTGTACTCTCTG |
| | | AGCAGCGTGGTCACAGTGCCAAGCTCTAGCCTGGGCACCCAGACCTACA |
| | | TCTGCAATGTGAACCACAAGCCTAGCAACACCAAGGTGGACAAGAAGGT |
| | | GGAACCCAAGAGCTGCGACAAGACCCACACCTGTCCTCCATGTCCTGCT |
| | | CCAGAACTGCTGGCCGGACCTTCCGTGTTCCTGTTTCCTCCAAA |
| | | GCCTAAGGACACCCTGATGATCAGCAGAACCCCTGAAGTGACCT |
| | | GCGTGGTGGTGGATGTGTCTCACGAGGACCCTGAAGTGAAGTTC |
| | | AATTGGTACGTGGACGGCGTGGAAGTGCACAACGCCAAGACCA |
| | | AGCCTAGAGAGGAACAGTACAACAGCACCTACAGAGTGGTGTCC |
| | | GTGCTGACCGTGCTGCACCAGGATTGGCTGAACGGCAAAGAGT |
| | | ACAAGTGCAAGGTGTCCAACAAGGCCCTGCCTCTGCCTGAGGAA |
| | | AAGACCATCAGCAAGGCCAAGGGCCAGCCTCGCGAACCTCAAGTCT |
| | | GTACACTGCCTCCTAGCCGCGAGGAAATGACCAAGAACCAGGTGTCCCT |
| | | GAGCTGCGCCGTGAAGGGCTTTTACCCTTCCGATATCGCCGTGGAATG |
| | | GGAGAGCAATGGCCAGCCTGAGAACAACTACAAGACAACCCCTCCTGTG |
| | | CTGGACAGCGACGGCTCATTCTTCCTGGTGTCCAAGCTGACAGTGGACA |
| | | AGAGCAGATGGCAGCAGGGCAACGTGTTCAGCTGCAGCGTGCTGCATG |
| | | AAGCCCTGCACAGCCACTACACCCAGAAGTCCCTGTCTCTGAGCCCCGG |
| | | CAAGTGATAA (SEQ ID NO: 1226) |
| | CH1-Hinge- | GCCTCTACAAAGGGCCCTAGCGTGTTCCCTCTGGCTCCTAGCAGCAAGT |
| | CH2(GAIE)-CH3 (cah- | CGACATCTGGCGGAACAGCCGCTCTGGGCTGTCTGGTCAAGGACTACTT |
| | LS) (G1m17) | TCCCGAGCCTGTGACAGTGTCCTGGAACTCTGGCGCTCTGACAAGCGG |
| | | CGTGCACACATTTCCAGCCGTGCTGCAAAGCAGCGGCCTGTACTCTCTG |
| | | AGCAGCGTGGTCACAGTGCCAAGCTCTAGCCTGGGCACCCAGACCTACA |
| | | TCTGCAATGTGAACCACAAGCCTAGCAACACCAAGGTGGACAAGAAGGT |
| | | GGAACCCAAGAGCTGCGACAAGACCCACACCTGTCCTCCATGTCCTGCT |
| | | CCAGAACTGCTGGCCGGACCTTCCGTGTTCCTGTTTCCTCCAAA |
| | | GCCTAAGGACACCCTGATGATCAGCAGAACCCCTGAAGTGACCT |
| | | GCGTGGTGGTGGATGTGTCTCACGAGGACCCTGAAGTGAAGTTC |
| | | AATTGGTACGTGGACGGCGTGGAAGTGCACAACGCCAAGACCA |
| | | AGCCTAGAGAGGAACAGTACAACAGCACCTACAGAGTGGTGTCC |
| | | GTGCTGACCGTGCTGCACCAGGATTGGCTGAACGGCAAAGAGT |
| | | ACAAGTGCAAGGTGTCCAACAAGGCCCTGCCTGCCCCTGAGGAA |
| | | AAGACCATCAGCAAGGCCAAGGGCCAGCCTCGCGAACCTCAAGTCT |
| | | GTACACTGCCTCCTAGCCGCGAGGAAATGACCAAGAACCAGGTGTCCCT |
| | | GAGCTGCGCCGTGAAGGGCTTTTACCCTTCCGATATCGCCGTGGAATG |
| | | GGAGAGCAATGGCCAGCCTGAGAACAACTACAAGACAACCCCTCCTGTG |
| | | CTGGACAGCGACGGCTCATTCTTCCTGGTGTCCAAGCTGACAGTGGACA |
| | | AGAGCAGATGGCAGCAGGGCAACGTGTTCAGCTGCAGCGTGCTGCATG |
| | | AAGCCCTGCACAGCCACTACACCCAGAAGTCCCTGTCTCTGAGCCCCGG |
| | | CAAGTGATAA (SEQ ID NO: 1227) |
| | CH1-Hinge- | GCCTCTACAAAGGGCCCTAGCGTGTTCCCTCTGGCTCCTAGCAGCAAGT |
| | CH2(GAALIE)-CH3 | CGACATCTGGCGGAACAGCCGCTCTGGGCTGTCTGGTCAAGGACTACTT |
| | (cak-LS) (G1m17) | TCCCGAGCCTGTGACAGTGTCCTGGAACTCTGGCGCTCTGACAAGCGG |
| | | CGTGCACACATTTCCAGCCGTGCTGCAAAGCAGCGGCCTGTACTCTCTG |
| | | AGCAGCGTGGTCACAGTGCCAAGCTCTAGCCTGGGCACCCAGACCTACA |
| | | TCTGCAATGTGAACCACAAGCCTAGCAACACCAAGGTGGACAAGAAGGT |
| | | GGAACCCAAGAGCTGCGACAAGACCCACACCTGTCCTCCATGTCCTGCT |
| | | CCAGAACTGCTGGCCGGACCTTCCGTGTTCCTGTTTCCTCCAAA |
| | | GCCTAAGGACACCCTGATGATCAGCAGAACCCCTGAAGTGACCT |
| | | GCGTGGTGGTGGATGTGTCTCACGAGGACCCTGAAGTGAAGTTC |
| | | AATTGGTACGTGGACGGCGTGGAAGTGCACAACGCCAAGACCA |
| | | AGCCTAGAGAGGAACAGTACAACAGCACCTACAGAGTGGTGTCC |
| | | GTGCTGACCGTGCTGCACCAGGATTGGCTGAACGGCAAAGAGT |
| | | ACAAGTGCAAGGTGTCCAACAAGGCCCTGCCTCTGCCTGAGGAA |
| | | AAGACCATCAGCAAGGCCAAGGGCCAGCCTAGGGAACCCCAGGTTT |
| | | ACACCCTGCCTCCATGCCGCGAGGAAATGACCAAGAACCAGGTGTCCCT |
| | | GTGGTGCCTGGTCAAGGGCTTCTACCCTTCCGATATCGCCGTGGAATG |
| | | GGAGAGCAATGGCCAGCCTGAGAACAACTACAAGACAACCCCTCCTGTG |
| | | CTGGACAGCGACGGCTCATTCTTCCTGTACAGCAAGCTGACAGTGGACA |
| | | AGAGCAGATGGCAGCAGGGCAACGTGTTCAGCTGCAGCGTGCTGCATG |
| | | AAGCCCTGCACAGCCACTACACCCAGAAGTCCCTGTCTCTGAGCCCCGG |
| | | CAAGTGATAA (SEQ ID NO: 1228) |
| | CH1-Hinge- | GCCTCTACAAAGGGCCCTAGCGTGTTCCCTCTGGCTCCTAGCAGCAAGT |
| | CH2(GAIE)-CH3 (cak- | CGACATCTGGCGGAACAGCCGCTCTGGGCTGTCTGGTCAAGGACTACTT |
| | LS) (G1m17) | TCCCGAGCCTGTGACAGTGTCCTGGAACTCTGGCGCTCTGACAAGCGG |
| | | CGTGCACACATTTCCAGCCGTGCTGCAAAGCAGCGGCCTGTACTCTCTG |
| | | AGCAGCGTGGTCACAGTGCCAAGCTCTAGCCTGGGCACCCAGACCTACA |
| | | TCTGCAATGTGAACCACAAGCCTAGCAACACCAAGGTGGACAAGAAGGT |
| | | GGAACCCAAGAGCTGCGACAAGACCCACACCTGTCCTCCATGTCCTGCT |
| | | CCAGAACTGCTGGCCGGACCTTCCGTGTTCCTGTTTCCTCCAAA |
| | | GCCTAAGGACACCCTGATGATCAGCAGAACCCCTGAAGTGACCT |
| | | GCGTGGTGGTGGATGTGTCTCACGAGGACCCTGAAGTGAAGTTC |
| | | AATTGGTACGTGGACGGCGTGGAAGTGCACAACGCCAAGACCA |
| | | AGCCTAGAGAGGAACAGTACAACAGCACCTACAGAGTGGTGTCC |
| | | GTGCTGACCGTGCTGCACCAGGATTGGCTGAACGGCAAAGAGT |
| | | ACAAGTGCAAGGTGTCCAACAAGGCCCTGCCTGCCCCTGAGGAA |
| | | AAGACCATCAGCAAGGCCAAGGGCCAGCCTAGGGAACCCCAGGTTT |
| | | ACACCCTGCCTCCATGCCGCGAGGAAATGACCAAGAACCAGGTGTCCCT |
| | | GTGGTGCCTGGTCAAGGGCTTCTACCCTTCCGATATCGCCGTGGAATG |
| | | GGAGAGCAATGGCCAGCCTGAGAACAACTACAAGACAACCCCTCCTGTG |
| | | CTGGACAGCGACGGCTCATTCTTCCTGTACAGCAAGCTGACAGTGGACA |
| | | AGAGCAGATGGCAGCAGGGCAACGTGTTCAGCTGCAGCGTGCTGCATG |
| | | AAGCCCTGCACAGCCACTACACCCAGAAGTCCCTGTCTCTGAGCCCCGG |
| | | CAAGTGATAA (SEQ ID NO: 1229) |
| | CH1-Hinge-CH2(GA)- | GCCTCTACAAAGGGCCCTAGCGTGTTCCCTCTGGCTCCTAGCAGCAAGT |
| | CH3 (LS) (G1m17,1) | CGACATCTGGCGGAACAGCCGCTCTGGGCTGTCTGGTCAAGGACTACTT |
| | | TCCCGAGCCTGTGACAGTGTCCTGGAACTCTGGCGCTCTGACAAGCGG |
| | | CGTGCACACATTTCCAGCCGTGCTGCAAAGCAGCGGCCTGTACTCTCTG |
| | | AGCAGCGTGGTCACAGTGCCAAGCTCTAGCCTGGGCACCCAGACCTACA |
| | | TCTGCAATGTGAACCACAAGCCTAGCAACACCAAGGTGGACAAGAAGGT |
| | | GGAACCCAAGAGCTGCGACAAGACCCACACCTGTCCTCCATGTCCTGCT |
| | | CCAGAACTGCTGGCCGGACCTTCCGTGTTCCTGTTTCCTCCAAA |
| | | GCCTAAGGACACCCTGATGATCAGCAGAACCCCTGAAGTGACCT |
| | | GCGTGGTGGTGGATGTGTCTCACGAGGACCCTGAAGTGAAGTTC |
| | | AATTGGTACGTGGACGGCGTGGAAGTGCACAACGCCAAGACCA |
| | | AGCCTAGAGAGGAACAGTACAACAGCACCTACAGAGTGGTGTCC |
| | | GTGCTGACCGTGCTGCACCAGGATTGGCTGAACGGCAAAGAGT |
| | | ACAAGTGCAAGGTGTCCAACAAGGCCCTGCCTGCCCCTATCGAA |
| | | AAGACCATCAGCAAGGCCAAGGGCCAGCCTAGGGAACCCCAGGTTT |
| | | ACACACTGCCTCCAAGCCGCGACGAACTGACCAAGAACCAGGTGTCCCT |
| | | GACCTGCCTCGTGAAGGGCTTCTACCCTTCCGATATCGCCGTGGAATGG |
| | | GAGAGCAATGGCCAGCCTGAGAACAACTACAAGACAACCCCTCCTGTGC |
| | | TGGACAGCGACGGCTCATTCTTCCTGTACAGCAAGCTGACCGTGGACAA |
| | | GTCCAGATGGCAGCAGGGCAACGTGTTCAGCTGTAGCGTGCTGCACGA |
| | | AGCCCTGCACAGCCACTACACCCAGAAAAGCCTGTCTCTGAGCCCCGGC |
| | | AAATGATAA (SEQ ID NO: 1230) |
| | CH1-Hinge-CH2(IE)- | GCCTCTACAAAGGGCCCTAGCGTGTTCCCTCTGGCTCCTAGCAGCAAGT |
| | CH3 (LS) (G1m17,1) | CGACATCTGGCGGAACAGCCGCTCTGGGCTGTCTGGTCAAGGACTACTT |
| | | TCCCGAGCCTGTGACAGTGTCCTGGAACTCTGGCGCTCTGACAAGCGG |
| | | CGTGCACACATTTCCAGCCGTGCTGCAAAGCAGCGGCCTGTACTCTCTG |
| | | AGCAGCGTGGTCACAGTGCCAAGCTCTAGCCTGGGCACCCAGACCTACA |
| | | TCTGCAATGTGAACCACAAGCCTAGCAACACCAAGGTGGACAAGAAGGT |
| | | GGAACCCAAGAGCTGCGACAAGACCCACACCTGTCCTCCATGTCCTGCT |
| | | CCAGAACTGCTGGGCGGACCTTCCGTGTTCCTGTTTCCTCCAAA |
| | | GCCTAAGGACACCCTGATGATCAGCAGAACCCCTGAAGTGACCT |
| | | GCGTGGTGGTGGATGTGTCTCACGAGGACCCTGAAGTGAAGTTC |
| | | AATTGGTACGTGGACGGCGTGGAAGTGCACAACGCCAAGACCA |
| | | AGCCTAGAGAGGAACAGTACAACAGCACCTACAGAGTGGTGTCC |
| | | GTGCTGACCGTGCTGCACCAGGATTGGCTGAACGGCAAAGAGT |
| | | ACAAGTGCAAGGTGTCCAACAAGGCCCTGCCTGCCCCTGAGGAA |
| | | AAGACCATCAGCAAGGCCAAGGGCCAGCCTAGGGAACCCCAGGTTT |
| | | ACACACTGCCTCCAAGCCGCGACGAACTGACCAAGAACCAGGTGTCCCT |
| | | GACCTGCCTCGTGAAGGGCTTCTACCCTTCCGATATCGCCGTGGAATGG |
| | | GAGAGCAATGGCCAGCCTGAGAACAACTACAAGACAACCCCTCCTGTGC |
| | | TGGACAGCGACGGCTCATTCTTCCTGTACAGCAAGCTGACCGTGGACAA |
| | | GTCCAGATGGCAGCAGGGCAACGTGTTCAGCTGTAGCGTGCTGCACGA |
| | | AGCCCTGCACAGCCACTACACCCAGAAAAGCCTGTCTCTGAGCCCCGGC |
| | | AAATGATAA (SEQ ID NO: 1231) |
| | CH1-Hinge-CH2-CH3 | GCCTCTACAAAGGGCCCTAGCGTGTTCCCTCTGGCTCCTAGCAGCAAGT |
| | (cah-LS) (G1m17,1) | CGACATCTGGCGGAACAGCCGCTCTGGGCTGTCTGGTCAAGGACTACTT |
| | | TCCCGAGCCTGTGACAGTGTCCTGGAACTCTGGCGCTCTGACAAGCGG |
| | | CGTGCACACATTTCCAGCCGTGCTGCAAAGCAGCGGCCTGTACTCTCTG |
| | | AGCAGCGTGGTCACAGTGCCAAGCTCTAGCCTGGGCACCCAGACCTACA |
| | | TCTGCAATGTGAACCACAAGCCTAGCAACACCAAGGTGGACAAGAAGGT |
| | | GGAACCCAAGAGCTGCGACAAGACCCACACCTGTCCTCCATGTCCTGCT |
| | | CCAGAACTGCTCGGCGGACCTTCCGTGTTCCTGTTTCCTCCAAA |
| | | GCCTAAGGACACCCTGATGATCAGCAGAACCCCTGAAGTGACCT |
| | | GCGTGGTGGTGGATGTGTCTCACGAGGACCCAGAAGTGAAGTT |
| | | CAATTGGTACGTGGACGGCGTGGAAGTGCACAACGCCAAGACC |
| | | AAGCCTAGAGAGGAACAGTACAACAGCACCTACAGAGTGGTGTC |
| | | CGTGCTGACAGTGCTGCACCAGGATTGGCTGAACGGCAAAGAG |
| | | TACAAGTGCAAGGTGTCCAACAAGGCCCTGCCTGCTCCTATCGA |
| | | GAAAACCATCAGCAAGGCCAAGGGCCAGCCTCGCGAACCTCAAGTC |
| | | TGTACACTGCCTCCTAGCCGCGACGAACTGACCAAGAACCAGGTGTCCC |
| | | TGAGCTGCGCCGTGAAGGGCTTTTACCCTTCCGATATCGCCGTGGAATG |
| | | GGAGAGCAATGGCCAGCCTGAGAACAACTACAAGACAACCCCTCCTGTG |
| | | CTGGACAGCGACGGCTCATTCTTCCTGGTGTCCAAGCTGACAGTGGACA |
| | | AGAGCAGATGGCAGCAGGGCAACGTGTTCAGCTGCAGCGTGCTGCATG |
| | | AAGCCCTGCACAGCCACTACACCCAGAAGTCCCTGTCTCTGAGCCCCGG |
| | | CAAGTGATAA (SEQ ID NO: 1232) |
| | CH1-Hinge- | GCCTCTACAAAGGGCCCTAGCGTGTTCCCTCTGGCTCCTAGCAGCAAGT |
| | CH2(GAALIE)-CH3 | CGACATCTGGCGGAACAGCCGCTCTGGGCTGTCTGGTCAAGGACTACTT |
| | (cah-LS) (G1m17,1) | TCCCGAGCCTGTGACAGTGTCCTGGAACTCTGGCGCTCTGACAAGCGG |
| | | CGTGCACACATTTCCAGCCGTGCTGCAAAGCAGCGGCCTGTACTCTCTG |
| | | AGCAGCGTGGTCACAGTGCCAAGCTCTAGCCTGGGCACCCAGACCTACA |
| | | TCTGCAATGTGAACCACAAGCCTAGCAACACCAAGGTGGACAAGAAGGT |
| | | GGAACCCAAGAGCTGCGACAAGACCCACACCTGTCCTCCATGTCCTGCT |
| | | CCAGAACTGCTGGCCGGACCTTCCGTGTTCCTGTTTCCTCCAAA |
| | | GCCTAAGGACACCCTGATGATCAGCAGAACCCCTGAAGTGACCT |
| | | GCGTGGTGGTGGATGTGTCTCACGAGGACCCTGAAGTGAAGTTC |
| | | AATTGGTACGTGGACGGCGTGGAAGTGCACAACGCCAAGACCA |
| | | AGCCTAGAGAGGAACAGTACAACAGCACCTACAGAGTGGTGTCC |
| | | GTGCTGACCGTGCTGCACCAGGATTGGCTGAACGGCAAAGAGT |
| | | ACAAGTGCAAGGTGTCCAACAAGGCCCTGCCTCTGCCTGAGGAA |
| | | AAGACCATCAGCAAGGCCAAGGGCCAGCCTCGCGAACCTCAAGTCT |
| | | GTACACTGCCTCCTAGCCGCGACGAACTGACCAAGAACCAGGTGTCCCT |
| | | GAGCTGCGCCGTGAAGGGCTTTTACCCTTCCGATATCGCCGTGGAATG |
| | | GGAGAGCAATGGCCAGCCTGAGAACAACTACAAGACAACCCCTCCTGTG |
| | | CTGGACAGCGACGGCTCATTCTTCCTGGTGTCCAAGCTGACAGTGGACA |
| | | AGAGCAGATGGCAGCAGGGCAACGTGTTCAGCTGCAGCGTGCTGCATG |
| | | AAGCCCTGCACAGCCACTACACCCAGAAGTCCCTGTCTCTGAGCCCCGG |
| | | CAAGTGATAA (SEQ ID NO: 1233) |
| | CH1-Hinge- | GCCTCTACAAAGGGCCCTAGCGTGTTCCCTCTGGCTCCTAGCAGCAAGT |
| | CH2(GAIE)-CH3 (cah- | CGACATCTGGCGGAACAGCCGCTCTGGGCTGTCTGGTCAAGGACTACTT |
| | LS) (G1m17,1) | TCCCGAGCCTGTGACAGTGTCCTGGAACTCTGGCGCTCTGACAAGCGG |
| | | CGTGCACACATTTCCAGCCGTGCTGCAAAGCAGCGGCCTGTACTCTCTG |
| | | AGCAGCGTGGTCACAGTGCCAAGCTCTAGCCTGGGCACCCAGACCTACA |
| | | TCTGCAATGTGAACCACAAGCCTAGCAACACCAAGGTGGACAAGAAGGT |
| | | GGAACCCAAGAGCTGCGACAAGACCCACACCTGTCCTCCATGTCCTGCT |
| | | CCAGAACTGCTGGCCGGACCTTCCGTGTTCCTGTTTCCTCCAAA |
| | | GCCTAAGGACACCCTGATGATCAGCAGAACCCCTGAAGTGACCT |
| | | GCGTGGTGGTGGATGTGTCTCACGAGGACCCTGAAGTGAAGTTC |
| | | AATTGGTACGTGGACGGCGTGGAAGTGCACAACGCCAAGACCA |
| | | AGCCTAGAGAGGAACAGTACAACAGCACCTACAGAGTGGTGTCC |
| | | GTGCTGACCGTGCTGCACCAGGATTGGCTGAACGGCAAAGAGT |
| | | ACAAGTGCAAGGTGTCCAACAAGGCCCTGCCTGCCCCTGAGGAA |
| | | AAGACCATCAGCAAGGCCAAGGGCCAGCCTCGCGAACCTCAAGTCT |
| | | GTACACTGCCTCCTAGCCGCGACGAACTGACCAAGAACCAGGTGTCCCT |
| | | GAGCTGCGCCGTGAAGGGCTTTTACCCTTCCGATATCGCCGTGGAATG |
| | | GGAGAGCAATGGCCAGCCTGAGAACAACTACAAGACAACCCCTCCTGTG |
| | | CTGGACAGCGACGGCTCATTCTTCCTGGTGTCCAAGCTGACAGTGGACA |
| | | AGAGCAGATGGCAGCAGGGCAACGTGTTCAGCTGCAGCGTGCTGCATG |
| | | AAGCCCTGCACAGCCACTACACCCAGAAGTCCCTGTCTCTGAGCCCCGG |
| | | CAAGTGATAA (SEQ ID NO: 1234) |
| | CH1-Hinge- | GCCTCTACAAAGGGCCCTAGCGTGTTCCCTCTGGCTCCTAGCAGCAAGT |
| | CH2(GAALIE)-CH3 | CGACATCTGGCGGAACAGCCGCTCTGGGCTGTCTGGTCAAGGACTACTT |
| | (cak-LS) (G1m17,1) | TCCCGAGCCTGTGACAGTGTCCTGGAACTCTGGCGCTCTGACAAGCGG |
| | | CGTGCACACATTTCCAGCCGTGCTGCAAAGCAGCGGCCTGTACTCTCTG |
| | | AGCAGCGTGGTCACAGTGCCAAGCTCTAGCCTGGGCACCCAGACCTACA |
| | | TCTGCAATGTGAACCACAAGCCTAGCAACACCAAGGTGGACAAGAAGGT |
| | | GGAACCCAAGAGCTGCGACAAGACCCACACCTGTCCTCCATGTCCTGCT |
| | | CCAGAACTGCTGGCCGGACCTTCCGTGTTCCTGTTTCCTCCAAA |
| | | GCCTAAGGACACCCTGATGATCAGCAGAACCCCTGAAGTGACCT |
| | | GCGTGGTGGTGGATGTGTCTCACGAGGACCCTGAAGTGAAGTTC |
| | | AATTGGTACGTGGACGGCGTGGAAGTGCACAACGCCAAGACCA |
| | | AGCCTAGAGAGGAACAGTACAACAGCACCTACAGAGTGGTGTCC |
| | | GTGCTGACCGTGCTGCACCAGGATTGGCTGAACGGCAAAGAGT |
| | | ACAAGTGCAAGGTGTCCAACAAGGCCCTGCCTCTGCCTGAGGAA |
| | | AAGACCATCAGCAAGGCCAAGGGCCAGCCTAGGGAACCCCAGGTTT |
| | | ACACCCTGCCTCCATGCCGCGACGAACTGACCAAGAACCAGGTGTCCCT |
| | | GTGGTGCCTGGTCAAGGGCTTCTACCCTTCCGATATCGCCGTGGAATG |
| | | GGAGAGCAATGGCCAGCCTGAGAACAACTACAAGACAACCCCTCCTGTG |
| | | CTGGACAGCGACGGCTCATTCTTCCTGTACAGCAAGCTGACAGTGGACA |
| | | AGAGCAGATGGCAGCAGGGCAACGTGTTCAGCTGCAGCGTGCTGCATG |
| | | AAGCCCTGCACAGCCACTACACCCAGAAGTCCCTGTCTCTGAGCCCCGG |
| | | CAAGTGATAA (SEQ ID NO: 1235) |
| | CH1-Hinge- | GCCTCTACAAAGGGCCCTAGCGTGTTCCCTCTGGCTCCTAGCAGCAAGT |
| | CH2(GAIE)-CH3 (cak- | CGACATCTGGCGGAACAGCCGCTCTGGGCTGTCTGGTCAAGGACTACTT |
| | LS) (G1m17,1) | TCCCGAGCCTGTGACAGTGTCCTGGAACTCTGGCGCTCTGACAAGCGG |
| | | CGTGCACACATTTCCAGCCGTGCTGCAAAGCAGCGGCCTGTACTCTCTG |
| | | AGCAGCGTGGTCACAGTGCCAAGCTCTAGCCTGGGCACCCAGACCTACA |
| | | TCTGCAATGTGAACCACAAGCCTAGCAACACCAAGGTGGACAAGAAGGT |
| | | GGAACCCAAGAGCTGCGACAAGACCCACACCTGTCCTCCATGTCCTGCT |
| | | CCAGAACTGCTGGCCGGACCTTCCGTGTTCCTGTTTCCTCCAAA |
| | | GCCTAAGGACACCCTGATGATCAGCAGAACCCCTGAAGTGACCT |
| | | GCGTGGTGGTGGATGTGTCTCACGAGGACCCTGAAGTGAAGTTC |
| | | AATTGGTACGTGGACGGCGTGGAAGTGCACAACGCCAAGACCA |
| | | AGCCTAGAGAGGAACAGTACAACAGCACCTACAGAGTGGTGTCC |
| | | GTGCTGACCGTGCTGCACCAGGATTGGCTGAACGGCAAAGAGT |
| | | ACAAGTGCAAGGTGTCCAACAAGGCCCTGCCTGCCCCTGAGGAA |
| | | AAGACCATCAGCAAGGCCAAGGGCCAGCCTAGGGAACCCCAGGTTT |
| | | ACACCCTGCCTCCATGCCGCGACGAACTGACCAAGAACCAGGTGTCCCT |
| | | GTGGTGCCTGGTCAAGGGCTTCTACCCTTCCGATATCGCCGTGGAATG |
| | | GGAGAGCAATGGCCAGCCTGAGAACAACTACAAGACAACCCCTCCTGTG |
| | | CTGGACAGCGACGGCTCATTCTTCCTGTACAGCAAGCTGACAGTGGACA |
| | | AGAGCAGATGGCAGCAGGGCAACGTGTTCAGCTGCAGCGTGCTGCATG |
| | | AAGCCCTGCACAGCCACTACACCCAGAAGTCCCTGTCTCTGAGCCCCGG |
| | | CAAGTGATAA (SEQ ID NO: 1236) |

### Plasmid DNA Preparation

[1411] Plasmid DNA is prepared by selecting E. coli clones for inoculation in Luria-Bertani (LB) medium containing kanamycin. The cultures are grown overnight at 37° C. and ~150 to 200 rpm. Following cell harvest, purification is done using the QIAGEN Plasmid Plus Maxi Kit according to the manufacturer's instructions. Finally, the concentration is determined by UV spectroscopy. DNA was stored in certified RNase- and DNase-free reaction tubes.

### Linearization and DNA Purification

[1412] Linearization of plasmid DNA is performed using appropriate restriction enzymes, followed by purification of the linearized DNA template using magnetic beads (Dynabeads™ MyOne™ Carboxylic Acid) according to the manufacturer's protocol. The DNA concentration is measured by UV spectroscopy.

### In Vitro Transcription

[1413] CleanCap 413 (m7(3′OMeG)(5′)ppp(5′)(2′OMeA)pG) capped RNA is produced following the process as disclosed, e.g., in WO 2021214204A1, which is incorporated herein by reference in its entirety. Methyl pseudo-uridine is used in the in vitro transcription reaction and incorporated into the produced RNA. Cellulose purification of the resulting RNA is performed to isolate single-stranded RNA, followed by concentration measurement by UV spectroscopy. The RNA integrity is determined by microfluidic-based electrophoresis.

### Example 10: Generation of Polyribonucleotides Encoding scFv-Fc PGDM1400

[1414] In this Example, polyribonucleotides encoding an PGDM1400 antibody agent are designed in silico as an scFv with different VH-to-VL orientations as well as interconnecting linkers having two different lengths (e.g., (G4S)₄ and (G4S)₅). The nucleotide sequences encoding the scFvs are cloned with a nucleotide sequence encoding an Fc domain to produce Fc-fusion constructs, which encode an antibody agent referred to as an “scFv-Fc” (illustrated in, e.g., FIG. 4, Panel C). The Fc-fusion constructs are cloned into the JR81 vector. scFv-Fc variants are cloned with and without an “LS” mutation. Lead candidates are further optimized by (i) introducing one of two different sequences encoding linkers (e.g., a (G4S)4 or (G4S)5 linker) between the scFv and Fc domain. Exemplary PGDM1400 antibody agent configurations and component immunoglobulin chains are shown in Table 5.

[1415] Objectives of the present Example include:
[1416] (1) Cloning scFv-Fc PGDM1400 L/S-encoding DNA into JR81 plasmid; and
[1417] (2) Verification of selected clones by control digestion and sequencing.

### Codon Optimization and Cloning Strategy

[1418] Codon optimization and cloning are performed as described above in Example 2. The nucleotide sequence of the resulting scFv-Fc chain-encoding plasmid constructs as well as the sequence of the backbone can be found in SEQ ID NOs: 1356, 1359, 1362, 1365, 1368, 1371, 1374, 1377, 1380, 1383, 1386, 1389, 1392, 1395, 1398, 1401, 1404, 1407, 1410, 1413, 1416, 1419, 1422, 1425, 1428, 1431, 1434, 1437, 1440, 1443, 1446, 1449, 1452, 1455, or 1458. Such sequences encode scFv-Fc chain amino acid sequences shown in SEQ ID NO: 1358, 1361, 1364, 1367, 1370, 1373, 1376, 1379, 1382, 1385, 1388, 1391, 1394, 1397, 1400, 1403, 1406, 1409, 1412, 1415, 1418, 1421, 1424, 1427, 1430, 1433, 1436, 1439, 1442, 1445, 1448, 1451, 1454, 1457, and 1460.

[1419] Exemplary sequences used in the cloning methods above are shown in Table 20 below.

TABLE 20
Exemplary sequences in scFv-Fc PGDM1400 encoding_polyribonucleotides.

| Feature | Fragment | Nucleotide Sequence |
|---|---|---|
| General | Hinge (C/S)-CH2- | GAACCTAAGAGCAGCGACAAGACCCACACCTGTCCTCCATGTCCTGCTCCAG |
| | CH3 (cah-LS) | AACTGCTCGGCGGACCTTCCGTGTTCCTGTTTCCTCCAAAGCCTAAG |
| | (G1m3) | GACACCCTGATGATCAGCAGAACCCCTGAAGTGACCTGCGTGGTGGT |
| | | GGATGTGTCTCACGAGGACCCAGAAGTGAAGTTCAATTGGTACGTGG |
| | | ACGGCGTGGAAGTGCACAACGCCAAGACCAAGCCTAGAGAGGAACA |
| | | GTACAACAGCACCTACAGAGTGGTGTCCGTGCTGACAGTGCTGCACC |
| | | AGGATTGGCTGAACGGCAAAGAGTACAAGTGCAAGGTGTCCAACAA |
| | | GGCCCTGCCTGCTCCTATCGAGAAAACCATCAGCAAGGCCAAGGGCC |
| | | AGCCTCGCGAACCTCAAGTCTGTACACTGCCTCCTAGCCGCGAGGAAATGAC |
| | | CAAGAACCAGGTGTCCCTGAGCTGCGCCGTGAAGGGCTTTTACCCTTCCGAT |
| | | ATCGCCGTGGAATGGGAGAGCAATGGCCAGCCTGAGAACAACTACAAGACAA |
| | | CCCCTCCTGTGCTGGACAGCGACGGCTCATTCTTCCTGGTGTCCAAGCTGAC |
| | | AGTGGACAAGAGCAGATGGCAGCAGGGCAACGTGTTCAGCTGCAGCGTGCT |
| | | GCATGAAGCCCTGCACAGCCACTACACCCAGAAGTCCCTGTCTCTGAGCCCC |
| | | GGCAAGTGATAA (SEQ ID NO: 1237) |
| | Hinge (C/S)-CH2 | GAACCTAAGAGCAGCGACAAGACCCACACCTGTCCTCCATGTCCTGCTCCAG |
| | (GAALIE)-CH3 | AACTGCTGGCCGGACCTTCCGTGTTCCTGTTTCCTCCAAAGCCTAAG |
| | (cah-LS) (G1m3) | GACACCCTGATGATCAGCAGAACCCCTGAAGTGACCTGCGTGGTGGT |
| | | GGATGTGTCTCACGAGGACCCTGAAGTGAAGTTCAATTGGTACGTGG |
| | | ACGGCGTGGAAGTGCACAACGCCAAGACCAAGCCTAGAGAGGAACA |
| | | GTACAACAGCACCTACAGAGTGGTGTCCGTGCTGACCGTGCTGCACC |
| | | AGGATTGGCTGAACGGCAAAGAGTACAAGTGCAAGGTGTCCAACAA |
| | | GGCCCTGCCTCTGCCTGAGGAAAAGACCATCAGCAAGGCCAAGGGCC |
| | | AGCCTCGCGAACCTCAAGTCTGTACACTGCCTCCTAGCCGCGAGGAAATGAC |
| | | CAAGAACCAGGTGTCCCTGAGCTGCGCCGTGAAGGGCTTTTACCCTTCCGAT |
| | | ATCGCCGTGGAATGGGAGAGCAATGGCCAGCCTGAGAACAACTACAAGACAA |
| | | CCCCTCCTGTGCTGGACAGCGACGGCTCATTCTTCCTGGTGTCCAAGCTGAC |
| | | AGTGGACAAGAGCAGATGGCAGCAGGGCAACGTGTTCAGCTGCAGCGTGCT |
| | | GCATGAAGCCCTGCACAGCCACTACACCCAGAAGTCCCTGTCTCTGAGCCCC |
| | | GGCAAGTGATAA (SEQ ID NO: 1238) |
| | Hinge (C/S)-CH2 | GAACCTAAGAGCAGCGACAAGACCCACACCTGTCCTCCATGTCCTGCTCCAG |
| | (GAIE)-CH3 (cah- | AACTGCTGGCCGGACCTTCCGTGTTCCTGTTTCCTCCAAAGCCTAAG |
| | LS) (G1m3) | GACACCCTGATGATCAGCAGAACCCCTGAAGTGACCTGCGTGGTGGT |
| | | GGATGTGTCTCACGAGGACCCTGAAGTGAAGTTCAATTGGTACGTGG |
| | | ACGGCGTGGAAGTGCACAACGCCAAGACCAAGCCTAGAGAGGAACA |
| | | GTACAACAGCACCTACAGAGTGGTGTCCGTGCTGACCGTGCTGCACC |
| | | AGGATTGGCTGAACGGCAAAGAGTACAAGTGCAAGGTGTCCAACAA |
| | | GGCCCTGCCTGCCCCTGAGGAAAAGACCATCAGCAAGGCCAAGGGCC |
| | | AGCCTCGCGAACCTCAAGTCTGTACACTGCCTCCTAGCCGCGAGGAAATGAC |
| | | CAAGAACCAGGTGTCCCTGAGCTGCGCCGTGAAGGGCTTTTACCCTTCCGAT |
| | | ATCGCCGTGGAATGGGAGAGCAATGGCCAGCCTGAGAACAACTACAAGACAA |
| | | CCCCTCCTGTGCTGGACAGCGACGGCTCATTCTTCCTGGTGTCCAAGCTGAC |
| | | AGTGGACAAGAGCAGATGGCAGCAGGGCAACGTGTTCAGCTGCAGCGTGCT |
| | | GCATGAAGCCCTGCACAGCCACTACACCCAGAAGTCCCTGTCTCTGAGCCCC |
| | | GGCAAGTGATAA (SEQ ID NO: 1239) |
| | Hinge (C/S)-CH2- | GAACCTAAGAGCAGCGACAAGACCCACACCTGTCCTCCATGTCCTGCTCCAG |
| | CH3 (cak-LS) | AACTGCTCGGCGGACCTTCCGTGTTCCTGTTTCCTCCAAAGCCTAAG |
| | (G1m3) | GACACCCTGATGATCAGCAGAACCCCTGAAGTGACCTGCGTGGTGGT |
| | | GGATGTGTCTCACGAGGACCCAGAAGTGAAGTTCAATTGGTACGTGG |
| | | ACGGCGTGGAAGTGCACAACGCCAAGACCAAGCCTAGAGAGGAACA |
| | | GTACAACAGCACCTACAGAGTGGTGTCCGTGCTGACAGTGCTGCACC |
| | | AGGATTGGCTGAACGGCAAAGAGTACAAGTGCAAGGTGTCCAACAA |
| | | GGCCCTGCCTGCTCCTATCGAGAAAACCATCAGCAAGGCCAAGGGCC |
| | | AGCCTAGGGAACCCCAGGTTTACACCCTGCCTCCATGCCGCGAGGAAATGAC |
| | | CAAGAACCAGGTGTCCCTGTGGTGCCTGGTCAAGGGCTTCTACCCTTCCGAT |
| | | ATCGCCGTGGAATGGGAGAGCAATGGCCAGCCTGAGAACAACTACAAGACAA |
| | | CCCCTCCTGTGCTGGACAGCGACGGCTCATTCTTCCTGTACAGCAAGCTGAC |
| | | AGTGGACAAGAGCAGATGGCAGCAGGGCAACGTGTTCAGCTGCAGCGTGCT |
| | | GCATGAAGCCCTGCACAGCCACTACACCCAGAAGTCCCTGTCTCTGAGCCCC |
| | | GGCAAGTGATAA (SEQ ID NO: 1240) |
| | Hinge (C/S)-CH2 | GAACCTAAGAGCAGCGACAAGACCCACACCTGTCCTCCATGTCCTGCTCCAG |
| | (GAALIE)-CH3 | AACTGCTGGCCGGACCTTCCGTGTTCCTGTTTCCTCCAAAGCCTAAG |
| | (cak-LS) (G1m3) | GACACCCTGATGATCAGCAGAACCCCTGAAGTGACCTGCGTGGTGGT |
| | | GGATGTGTCTCACGAGGACCCTGAAGTGAAGTTCAATTGGTACGTGG |
| | | ACGGCGTGGAAGTGCACAACGCCAAGACCAAGCCTAGAGAGGAACA |
| | | GTACAACAGCACCTACAGAGTGGTGTCCGTGCTGACCGTGCTGCACC |
| | | AGGATTGGCTGAACGGCAAAGAGTACAAGTGCAAGGTGTCCAACAA |
| | | GGCCCTGCCTCTGCCTGAGGAAAAGACCATCAGCAAGGCCAAGGGCC |
| | | AGCCTAGGGAACCCCAGGTTTACACCCTGCCTCCATGCCGCGAGGAAATGAC |
| | | CAAGAACCAGGTGTCCCTGTGGTGCCTGGTCAAGGGCTTCTACCCTTCCGAT |
| | | ATCGCCGTGGAATGGGAGAGCAATGGCCAGCCTGAGAACAACTACAAGACAA |
| | | CCCCTCCTGTGCTGGACAGCGACGGCTCATTCTTCCTGTACAGCAAGCTGAC |
| | | AGTGGACAAGAGCAGATGGCAGCAGGGCAACGTGTTCAGCTGCAGCGTGCT |
| | | GCATGAAGCCCTGCACAGCCACTACACCCAGAAGTCCCTGTCTCTGAGCCCC |
| | | GGCAAGTGATAA (SEQ ID NO: 1241) |
| | Hinge (C/S)-CH2 | GAACCTAAGAGCAGCGACAAGACCCACACCTGTCCTCCATGTCCTGCTCCAG |
| | (GAIE)-CH3 (cak- | AACTGCTGGCCGGACCTTCCGTGTTCCTGTTTCCTCCAAAGCCTAAG |
| | LS) (G1m3) | GACACCCTGATGATCAGCAGAACCCCTGAAGTGACCTGCGTGGTGGT |
| | | GGATGTGTCTCACGAGGACCCTGAAGTGAAGTTCAATTGGTACGTGG |
| | | ACGGCGTGGAAGTGCACAACGCCAAGACCAAGCCTAGAGAGGAACA |
| | | GTACAACAGCACCTACAGAGTGGTGTCCGTGCTGACCGTGCTGCACC |
| | | AGGATTGGCTGAACGGCAAAGAGTACAAGTGCAAGGTGTCCAACAA |
| | | GGCCCTGCCTGCCCCTGAGGAAAAGACCATCAGCAAGGCCAAGGGCC |
| | | AGCCTAGGGAACCCCAGGTTTACACCCTGCCTCCATGCCGCGAGGAAATGAC |
| | | CAAGAACCAGGTGTCCCTGTGGTGCCTGGTCAAGGGCTTCTACCCTTCCGAT |
| | | ATCGCCGTGGAATGGGAGAGCAATGGCCAGCCTGAGAACAACTACAAGACAA |
| | | CCCCTCCTGTGCTGGACAGCGACGGCTCATTCTTCCTGTACAGCAAGCTGAC |
| | | AGTGGACAAGAGCAGATGGCAGCAGGGCAACGTGTTCAGCTGCAGCGTGCT |
| | | GCATGAAGCCCTGCACAGCCACTACACCCAGAAGTCCCTGTCTCTGAGCCCC |
| | | GGCAAGTGATAA (SEQ ID NO: 1242) |
| | Hinge (C/S)-CH2- | GAACCTAAGAGCAGCGACAAGACCCACACCTGTCCTCCATGTCCTGCTCCAG |
| | CH3 (cah-LS) | AACTGCTCGGCGGACCTTCCGTGTTCCTGTTTCCTCCAAAGCCTAAG |
| | (G1m17) | GACACCCTGATGATCAGCAGAACCCCTGAAGTGACCTGCGTGGTGGT |
| | | GGATGTGTCTCACGAGGACCCAGAAGTGAAGTTCAATTGGTACGTGG |
| | | ACGGCGTGGAAGTGCACAACGCCAAGACCAAGCCTAGAGAGGAACA |
| | | GTACAACAGCACCTACAGAGTGGTGTCCGTGCTGACAGTGCTGCACC |
| | | AGGATTGGCTGAACGGCAAAGAGTACAAGTGCAAGGTGTCCAACAA |
| | | GGCCCTGCCTGCTCCTATCGAGAAAACCATCAGCAAGGCCAAGGGCC |
| | | AGCCTCGCGAACCTCAAGTCTGTACACTGCCTCCTAGCCGCGAGGAAATGAC |
| | | CAAGAACCAGGTGTCCCTGAGCTGCGCCGTGAAGGGCTTTTACCCTTCCGAT |
| | | ATCGCCGTGGAATGGGAGAGCAATGGCCAGCCTGAGAACAACTACAAGACAA |
| | | CCCCTCCTGTGCTGGACAGCGACGGCTCATTCTTCCTGGTGTCCAAGCTGAC |
| | | AGTGGACAAGAGCAGATGGCAGCAGGGCAACGTGTTCAGCTGCAGCGTGCT |
| | | GCATGAAGCCCTGCACAGCCACTACACCCAGAAGTCCCTGTCTCTGAGCCCC |
| | | GGCAAGTGATAA (SEQ ID NO: 1243) |
| | Hinge (C/S)-CH2 | GAACCTAAGAGCAGCGACAAGACCCACACCTGTCCTCCATGTCCTGCTCCAG |
| | (GAALIE)-CH3 | AACTGCTGGCCGGACCTTCCGTGTTCCTGTTTCCTCCAAAGCCTAAG |
| | (cah-LS) (G1m17) | GACACCCTGATGATCAGCAGAACCCCTGAAGTGACCTGCGTGGTGGT |
| | | GGATGTGTCTCACGAGGACCCTGAAGTGAAGTTCAATTGGTACGTGG |
| | | ACGGCGTGGAAGTGCACAACGCCAAGACCAAGCCTAGAGAGGAACA |
| | | GTACAACAGCACCTACAGAGTGGTGTCCGTGCTGACCGTGCTGCACC |
| | | AGGATTGGCTGAACGGCAAAGAGTACAAGTGCAAGGTGTCCAACAA |
| | | GGCCCTGCCTCTGCCTGAGGAAAAGACCATCAGCAAGGCCAAGGGCC |
| | | AGCCTCGCGAACCTCAAGTCTGTACACTGCCTCCTAGCCGCGAGGAAATGAC |
| | | CAAGAACCAGGTGTCCCTGAGCTGCGCCGTGAAGGGCTTTTACCCTTCCGAT |
| | | ATCGCCGTGGAATGGGAGAGCAATGGCCAGCCTGAGAACAACTACAAGACAA |
| | | CCCCTCCTGTGCTGGACAGCGACGGCTCATTCTTCCTGGTGTCCAAGCTGAC |
| | | AGTGGACAAGAGCAGATGGCAGCAGGGCAACGTGTTCAGCTGCAGCGTGCT |
| | | GCATGAAGCCCTGCACAGCCACTACACCCAGAAGTCCCTGTCTCTGAGCCCC |
| | | GGCAAGTGATAA (SEQ ID NO: 1244) |
| | Hinge (C/S)-CH2 | GAACCTAAGAGCAGCGACAAGACCCACACCTGTCCTCCATGTCCTGCTCCAG |
| | (GAIE)-CH3 (cah- | AACTGCTGGCCGGACCTTCCGTGTTCCTGTTTCCTCCAAAGCCTAAG |
| | LS) (G1m17) | GACACCCTGATGATCAGCAGAACCCCTGAAGTGACCTGCGTGGTGGT |
| | | GGATGTGTCTCACGAGGACCCTGAAGTGAAGTTCAATTGGTACGTGG |
| | | ACGGCGTGGAAGTGCACAACGCCAAGACCAAGCCTAGAGAGGAACA |
| | | GTACAACAGCACCTACAGAGTGGTGTCCGTGCTGACCGTGCTGCACC |
| | | AGGATTGGCTGAACGGCAAAGAGTACAAGTGCAAGGTGTCCAACAA |
| | | GGCCCTGCCTGCCCCTGAGGAAAAGACCATCAGCAAGGCCAAGGGCC |
| | | AGCCTCGCGAACCTCAAGTCTGTACACTGCCTCCTAGCCGCGAGGAAATGAC |
| | | CAAGAACCAGGTGTCCCTGAGCTGCGCCGTGAAGGGCTTTTACCCTTCCGAT |
| | | ATCGCCGTGGAATGGGAGAGCAATGGCCAGCCTGAGAACAACTACAAGACAA |
| | | CCCCTCCTGTGCTGGACAGCGACGGCTCATTCTTCCTGGTGTCCAAGCTGAC |
| | | AGTGGACAAGAGCAGATGGCAGCAGGGCAACGTGTTCAGCTGCAGCGTGCT |
| | | GCATGAAGCCCTGCACAGCCACTACACCCAGAAGTCCCTGTCTCTGAGCCCC |
| | | GGCAAGTGATAA (SEQ ID NO: 1245) |
| | Hinge (C/S)-CH2- | GAACCTAAGAGCAGCGACAAGACCCACACCTGTCCTCCATGTCCTGCTCCAG |
| | CH3 (cak-LS) | AACTGCTCGGCGGACCTTCCGTGTTCCTGTTTCCTCCAAAGCCTAAG |
| | (G1m17) | GACACCCTGATGATCAGCAGAACCCCTGAAGTGACCTGCGTGGTGGT |
| | | GGATGTGTCTCACGAGGACCCAGAAGTGAAGTTCAATTGGTACGTGG |
| | | ACGGCGTGGAAGTGCACAACGCCAAGACCAAGCCTAGAGAGGAACA |
| | | GTACAACAGCACCTACAGAGTGGTGTCCGTGCTGACAGTGCTGCACC |
| | | AGGATTGGCTGAACGGCAAAGAGTACAAGTGCAAGGTGTCCAACAA |
| | | GGCCCTGCCTGCTCCTATCGAGAAAACCATCAGCAAGGCCAAGGGCC |
| | | AGCCTAGGGAACCCCAGGTTTACACCCTGCCTCCATGCCGCGAGGAAATGAC |
| | | CAAGAACCAGGTGTCCCTGTGGTGCCTGGTCAAGGGCTTCTACCCTTCCGAT |
| | | ATCGCCGTGGAATGGGAGAGCAATGGCCAGCCTGAGAACAACTACAAGACAA |
| | | CCCCTCCTGTGCTGGACAGCGACGGCTCATTCTTCCTGTACAGCAAGCTGAC |
| | | AGTGGACAAGAGCAGATGGCAGCAGGGCAACGTGTTCAGCTGCAGCGTGCT |
| | | GCATGAAGCCCTGCACAGCCACTACACCCAGAAGTCCCTGTCTCTGAGCCCC |
| | | GGCAAGTGATAA (SEQ ID NO: 1246) |
| | Hinge (C/S)-CH2 | GAACCTAAGAGCAGCGACAAGACCCACACCTGTCCTCCATGTCCTGCTCCAG |
| | (GAALIE)-CH3 | AACTGCTGGCCGGACCTTCCGTGTTCCTGTTTCCTCCAAAGCCTAAG |
| | (cak-LS) (G1m17) | GACACCCTGATGATCAGCAGAACCCCTGAAGTGACCTGCGTGGTGGT |
| | | GGATGTGTCTCACGAGGACCCTGAAGTGAAGTTCAATTGGTACGTGG |
| | | ACGGCGTGGAAGTGCACAACGCCAAGACCAAGCCTAGAGAGGAACA |
| | | GTACAACAGCACCTACAGAGTGGTGTCCGTGCTGACCGTGCTGCACC |
| | | AGGATTGGCTGAACGGCAAAGAGTACAAGTGCAAGGTGTCCAACAA |
| | | GGCCCTGCCTCTGCCTGAGGAAAAGACCATCAGCAAGGCCAAGGGCC |
| | | AGCCTAGGGAACCCCAGGTTTACACCCTGCCTCCATGCCGCGAGGAAATGAC |
| | | CAAGAACCAGGTGTCCCTGTGGTGCCTGGTCAAGGGCTTCTACCCTTCCGAT |
| | | ATCGCCGTGGAATGGGAGAGCAATGGCCAGCCTGAGAACAACTACAAGACAA |
| | | CCCCTCCTGTGCTGGACAGCGACGGCTCATTCTTCCTGTACAGCAAGCTGAC |
| | | AGTGGACAAGAGCAGATGGCAGCAGGGCAACGTGTTCAGCTGCAGCGTGCT |
| | | GCATGAAGCCCTGCACAGCCACTACACCCAGAAGTCCCTGTCTCTGAGCCCC |
| | | GGCAAGTGATAA (SEQ ID NO: 1247) |
| | Hinge (C/S)-CH2 | GAACCTAAGAGCAGCGACAAGACCCACACCTGTCCTCCATGTCCTGCTCCAG |
| | (GAIE)-CH3 (cak- | AACTGCTGGCCGGACCTTCCGTGTTCCTGTTTCCTCCAAAGCCTAAG |
| | LS) (G1m17) | GACACCCTGATGATCAGCAGAACCCCTGAAGTGACCTGCGTGGTGGT |
| | | GGATGTGTCTCACGAGGACCCTGAAGTGAAGTTCAATTGGTACGTGG |
| | | ACGGCGTGGAAGTGCACAACGCCAAGACCAAGCCTAGAGAGGAACA |
| | | GTACAACAGCACCTACAGAGTGGTGTCCGTGCTGACCGTGCTGCACC |
| | | AGGATTGGCTGAACGGCAAAGAGTACAAGTGCAAGGTGTCCAACAA |
| | | GGCCCTGCCTGCCCCTGAGGAAAAGACCATCAGCAAGGCCAAGGGCC |
| | | AGCCTAGGGAACCCCAGGTTTACACCCTGCCTCCATGCCGCGAGGAAATGAC |
| | | CAAGAACCAGGTGTCCCTGTGGTGCCTGGTCAAGGGCTTCTACCCTTCCGAT |
| | | ATCGCCGTGGAATGGGAGAGCAATGGCCAGCCTGAGAACAACTACAAGACAA |
| | | CCCCTCCTGTGCTGGACAGCGACGGCTCATTCTTCCTGTACAGCAAGCTGAC |
| | | AGTGGACAAGAGCAGATGGCAGCAGGGCAACGTGTTCAGCTGCAGCGTGCT |
| | | GCATGAAGCCCTGCACAGCCACTACACCCAGAAGTCCCTGTCTCTGAGCCCC |
| | | GGCAAGTGATAA (SEQ ID NO: 1248) |
| | Hinge (C/S)-CH2- | GAACCTAAGAGCAGCGACAAGACCCACACCTGTCCTCCATGTCCTGCTCCAG |
| | CH3 (cah-LS) | AACTGCTCGGCGGACCTTCCGTGTTCCTGTTTCCTCCAAAGCCTAAG |
| | (G1m17,1) | GACACCCTGATGATCAGCAGAACCCCTGAAGTGACCTGCGTGGTGGT |
| | | GGATGTGTCTCACGAGGACCCAGAAGTGAAGTTCAATTGGTACGTGG |
| | | ACGGCGTGGAAGTGCACAACGCCAAGACCAAGCCTAGAGAGGAACA |
| | | GTACAACAGCACCTACAGAGTGGTGTCCGTGCTGACAGTGCTGCACC |
| | | AGGATTGGCTGAACGGCAAAGAGTACAAGTGCAAGGTGTCCAACAA |
| | | GGCCCTGCCTGCTCCTATCGAGAAAACCATCAGCAAGGCCAAGGGCC |
| | | AGCCTCGCGAACCTCAAGTCTGTACACTGCCTCCTAGCCGCGACGAACTGAC |
| | | CAAGAACCAGGTGTCCCTGAGCTGCGCCGTGAAGGGCTTTTACCCTTCCGAT |
| | | ATCGCCGTGGAATGGGAGAGCAATGGCCAGCCTGAGAACAACTACAAGACAA |
| | | CCCCTCCTGTGCTGGACAGCGACGGCTCATTCTTCCTGGTGTCCAAGCTGAC |
| | | AGTGGACAAGAGCAGATGGCAGCAGGGCAACGTGTTCAGCTGCAGCGTGCT |
| | | GCATGAAGCCCTGCACAGCCACTACACCCAGAAGTCCCTGTCTCTGAGCCCC |
| | | GGCAAGTGATAA (SEQ ID NO: 1249) |
| | Hinge (C/S)-CH2 | GAACCTAAGAGCAGCGACAAGACCCACACCTGTCCTCCATGTCCTGCTCCAG |
| | (GAALIE)-CH3 | AACTGCTGGCCGGACCTTCCGTGTTCCTGTTTCCTCCAAAGCCTAAG |
| | (cah-LS) | GACACCCTGATGATCAGCAGAACCCCTGAAGTGACCTGCGTGGTGGT |
| | (G1m17,1) | GGATGTGTCTCACGAGGACCCTGAAGTGAAGTTCAATTGGTACGTGG |
| | | ACGGCGTGGAAGTGCACAACGCCAAGACCAAGCCTAGAGAGGAACA |
| | | GTACAACAGCACCTACAGAGTGGTGTCCGTGCTGACCGTGCTGCACC |
| | | AGGATTGGCTGAACGGCAAAGAGTACAAGTGCAAGGTGTCCAACAA |
| | | GGCCCTGCCTCTGCCTGAGGAAAAGACCATCAGCAAGGCCAAGGGCC |
| | | AGCCTCGCGAACCTCAAGTCTGTACACTGCCTCCTAGCCGCGACGAACTGAC |
| | | CAAGAACCAGGTGTCCCTGAGCTGCGCCGTGAAGGGCTTTTACCCTTCCGAT |
| | | ATCGCCGTGGAATGGGAGAGCAATGGCCAGCCTGAGAACAACTACAAGACAA |
| | | CCCCTCCTGTGCTGGACAGCGACGGCTCATTCTTCCTGGTGTCCAAGCTGAC |
| | | AGTGGACAAGAGCAGATGGCAGCAGGGCAACGTGTTCAGCTGCAGCGTGCT |
| | | GCATGAAGCCCTGCACAGCCACTACACCCAGAAGTCCCTGTCTCTGAGCCCC |
| | | GGCAAGTGATAA (SEQ ID NO: 1250) |
| | Hinge (C/S)-CH2 | GAACCTAAGAGCAGCGACAAGACCCACACCTGTCCTCCATGTCCTGCTCCAG |
| | (GAIE)-CH3 (cah- | AACTGCTGGCCGGACCTTCCGTGTTCCTGTTTCCTCCAAAGCCTAAG |
| | LS) (G1m17,1) | GACACCCTGATGATCAGCAGAACCCCTGAAGTGACCTGCGTGGTGGT |
| | | GGATGTGTCTCACGAGGACCCTGAAGTGAAGTTCAATTGGTACGTGG |
| | | ACGGCGTGGAAGTGCACAACGCCAAGACCAAGCCTAGAGAGGAACA |
| | | GTACAACAGCACCTACAGAGTGGTGTCCGTGCTGACCGTGCTGCACC |
| | | AGGATTGGCTGAACGGCAAAGAGTACAAGTGCAAGGTGTCCAACAA |
| | | GGCCCTGCCTGCCCCTGAGGAAAAGACCATCAGCAAGGCCAAGGGCC |
| | | AGCCTCGCGAACCTCAAGTCTGTACACTGCCTCCTAGCCGCGACGAACTGAC |
| | | CAAGAACCAGGTGTCCCTGAGCTGCGCCGTGAAGGGCTTTTACCCTTCCGAT |
| | | ATCGCCGTGGAATGGGAGAGCAATGGCCAGCCTGAGAACAACTACAAGACAA |
| | | CCCCTCCTGTGCTGGACAGCGACGGCTCATTCTTCCTGGTGTCCAAGCTGAC |
| | | AGTGGACAAGAGCAGATGGCAGCAGGGCAACGTGTTCAGCTGCAGCGTGCT |
| | | GCATGAAGCCCTGCACAGCCACTACACCCAGAAGTCCCTGTCTCTGAGCCCC |
| | | GGCAAGTGATAA (SEQ ID NO: 1251) |
| | Hinge (C/S)-CH2- | GAACCTAAGAGCAGCGACAAGACCCACACCTGTCCTCCATGTCCTGCTCCAG |
| | CH3 (cak-LS) | AACTGCTCGGCGGACCTTCCGTGTTCCTGTTTCCTCCAAAGCCTAAG |
| | (G1m17,1) | GACACCCTGATGATCAGCAGAACCCCTGAAGTGACCTGCGTGGTGGT |
| | | GGATGTGTCTCACGAGGACCCAGAAGTGAAGTTCAATTGGTACGTGG |
| | | ACGGCGTGGAAGTGCACAACGCCAAGACCAAGCCTAGAGAGGAACA |
| | | GTACAACAGCACCTACAGAGTGGTGTCCGTGCTGACAGTGCTGCACC |
| | | AGGATTGGCTGAACGGCAAAGAGTACAAGTGCAAGGTGTCCAACAA |
| | | GGCCCTGCCTGCTCCTATCGAGAAAACCATCAGCAAGGCCAAGGGCC |
| | | AGCCTAGGGAACCCCAGGTTTACACCCTGCCTCCATGCCGCGACGAACTGAC |
| | | CAAGAACCAGGTGTCCCTGTGGTGCCTGGTCAAGGGCTTCTACCCTTCCGAT |
| | | ATCGCCGTGGAATGGGAGAGCAATGGCCAGCCTGAGAACAACTACAAGACAA |
| | | CCCCTCCTGTGCTGGACAGCGACGGCTCATTCTTCCTGTACAGCAAGCTGAC |
| | | AGTGGACAAGAGCAGATGGCAGCAGGGCAACGTGTTCAGCTGCAGCGTGCT |
| | | GCATGAAGCCCTGCACAGCCACTACACCCAGAAGTCCCTGTCTCTGAGCCCC |
| | | GGCAAGTGATAA (SEQ ID NO: 1252) |
| | Hinge (C/S)-CH2 | GAACCTAAGAGCAGCGACAAGACCCACACCTGTCCTCCATGTCCTGCTCCAG |
| | (GAALIE)-CH3 | AACTGCTGGCCGGACCTTCCGTGTTCCTGTTTCCTCCAAAGCCTAAG |
| | (cak-LS) | GACACCCTGATGATCAGCAGAACCCCTGAAGTGACCTGCGTGGTGGT |
| | (G1m17,1) | GGATGTGTCTCACGAGGACCCTGAAGTGAAGTTCAATTGGTACGTGG |
| | | ACGGCGTGGAAGTGCACAACGCCAAGACCAAGCCTAGAGAGGAACA |
| | | GTACAACAGCACCTACAGAGTGGTGTCCGTGCTGACCGTGCTGCACC |
| | | AGGATTGGCTGAACGGCAAAGAGTACAAGTGCAAGGTGTCCAACAA |
| | | GGCCCTGCCTCTGCCTGAGGAAAAGACCATCAGCAAGGCCAAGGGCC |
| | | AGCCTAGGGAACCCCAGGTTTACACCCTGCCTCCATGCCGCGACGAACTGAC |
| | | CAAGAACCAGGTGTCCCTGTGGTGCCTGGTCAAGGGCTTCTACCCTTCCGAT |
| | | ATCGCCGTGGAATGGGAGAGCAATGGCCAGCCTGAGAACAACTACAAGACAA |
| | | CCCCTCCTGTGCTGGACAGCGACGGCTCATTCTTCCTGTACAGCAAGCTGAC |
| | | AGTGGACAAGAGCAGATGGCAGCAGGGCAACGTGTTCAGCTGCAGCGTGCT |
| | | GCATGAAGCCCTGCACAGCCACTACACCCAGAAGTCCCTGTCTCTGAGCCCC |
| | | GGCAAGTGATAA (SEQ ID NO: 1253) |
| | Hinge (C/S)-CH2 | GAACCTAAGAGCAGCGACAAGACCCACACCTGTCCTCCATGTCCTGCTCCAG |
| | (GAIE)-CH3 (cak- | AACTGCTGGCCGGACCTTCCGTGTTCCTGTTTCCTCCAAAGCCTAAG |
| | LS) (G1m17,1) | GACACCCTGATGATCAGCAGAACCCCTGAAGTGACCTGCGTGGTGGT |
| | | GGATGTGTCTCACGAGGACCCTGAAGTGAAGTTCAATTGGTACGTGG |
| | | ACGGCGTGGAAGTGCACAACGCCAAGACCAAGCCTAGAGAGGAACA |
| | | GTACAACAGCACCTACAGAGTGGTGTCCGTGCTGACCGTGCTGCACC |
| | | AGGATTGGCTGAACGGCAAAGAGTACAAGTGCAAGGTGTCCAACAA |
| | | GGCCCTGCCTGCCCCTGAGGAAAAGACCATCAGCAAGGCCAAGGGCC |
| | | AGCCTAGGGAACCCCAGGTTTACACCCTGCCTCCATGCCGCGACGAACTGAC |
| | | CAAGAACCAGGTGTCCCTGTGGTGCCTGGTCAAGGGCTTCTACCCTTCCGAT |
| | | ATCGCCGTGGAATGGGAGAGCAATGGCCAGCCTGAGAACAACTACAAGACAA |
| | | CCCCTCCTGTGCTGGACAGCGACGGCTCATTCTTCCTGTACAGCAAGCTGAC |
| | | AGTGGACAAGAGCAGATGGCAGCAGGGCAACGTGTTCAGCTGCAGCGTGCT |
| | | GCATGAAGCCCTGCACAGCCACTACACCCAGAAGTCCCTGTCTCTGAGCCCC |
| | | GGCAAGTGATAA (SEQ ID NO: 1254) |
| General | Hinge (C/S)-CH2- | GAACCTAAGAGCAGCGACAAGACCCACACCTGTCCTCCATGTCCTGCTCCAG |
| | CH3 (G1m3) | AACTGCTCGGCGGACCTTCCGTGTTCCTGTTTCCTCCAAAGCCTAAG |
| | | GACACCCTGATGATCAGCAGAACCCCTGAAGTGACCTGCGTGGTGGT |
| | | GGATGTGTCTCACGAGGACCCAGAAGTGAAGTTCAATTGGTACGTGG |
| | | ACGGCGTGGAAGTGCACAACGCCAAGACCAAGCCTAGAGAGGAACA |
| | | GTACAACAGCACCTACAGAGTGGTGTCCGTGCTGACAGTGCTGCACC |
| | | AGGATTGGCTGAACGGCAAAGAGTACAAGTGCAAGGTGTCCAACAA |
| | | GGCCCTGCCTGCTCCTATCGAGAAAACCATCAGCAAGGCCAAGGGCC |
| | | AGCCTAGGGAACCCCAGGTTTACACACTGCCTCCAAGCCGCGAGGAAATGAC |
| | | CAAGAACCAGGTGTCCCTGACCTGCCTCGTGAAGGGCTTCTACCCTTCCGAT |
| | | ATCGCCGTGGAATGGGAGAGCAATGGCCAGCCTGAGAACAACTACAAGACAA |
| | | CCCCTCCTGTGCTGGACAGCGACGGCTCATTCTTCCTGTACAGCAAGCTGAC |
| | | TGTGGATAAGTCCCGGTGGCAGCAGGGCAACGTGTTCAGCTGTTCTGTGATG |
| | | CACGAAGCCCTGCACAACCACTACACCCAGAAAAGCCTGTCTCTGAGCCCCG |
| | | GCAAGTGATAA (SEQ ID NO: 1255) |
| | Hinge (C/S)-CH2 | GAACCTAAGAGCAGCGACAAGACCCACACCTGTCCTCCATGTCCTGCTCCAG |
| | (GAALIE)-CH3 | AACTGCTGGCCGGACCTTCCGTGTTCCTGTTTCCTCCAAAGCCTAAG |
| | (LS) (G1m3) | GACACCCTGATGATCAGCAGAACCCCTGAAGTGACCTGCGTGGTGGT |
| | | GGATGTGTCTCACGAGGACCCTGAAGTGAAGTTCAATTGGTACGTGG |
| | | ACGGCGTGGAAGTGCACAACGCCAAGACCAAGCCTAGAGAGGAACA |
| | | GTACAACAGCACCTACAGAGTGGTGTCCGTGCTGACCGTGCTGCACC |
| | | AGGATTGGCTGAACGGCAAAGAGTACAAGTGCAAGGTGTCCAACAA |
| | | GGCCCTGCCTCTGCCTGAGGAAAAGACCATCAGCAAGGCCAAGGGCC |
| | | AGCCTAGGGAACCCCAGGTTTACACACTGCCTCCAAGCCGCGAGGAAATGAC |
| | | CAAGAACCAGGTGTCCCTGACCTGCCTCGTGAAGGGCTTCTACCCTTCCGAT |
| | | ATCGCCGTGGAATGGGAGAGCAATGGCCAGCCTGAGAACAACTACAAGACAA |
| | | CCCCTCCTGTGCTGGACAGCGACGGCTCATTCTTCCTGTACAGCAAGCTGAC |
| | | CGTGGACAAGTCCAGATGGCAGCAGGGCAACGTGTTCAGCTGTAGCGTGCT |
| | | GCACGAAGCCCTGCACAGCCACTACACCCAGAAAAGCCTGTCTCTGAGCCCC |
| | | GGCAAATGATAA (SEQ ID NO: 1256) |
| | Hinge (C/S)-CH2 | GAACCTAAGAGCAGCGACAAGACCCACACCTGTCCTCCATGTCCTGCTCCAG |
| | (GAIE)-CH3 (LS) | AACTGCTGGCCGGACCTTCCGTGTTCCTGTTTCCTCCAAAGCCTAAG |
| | (G1m3) | GACACCCTGATGATCAGCAGAACCCCTGAAGTGACCTGCGTGGTGGT |
| | | GGATGTGTCTCACGAGGACCCTGAAGTGAAGTTCAATTGGTACGTGG |
| | | ACGGCGTGGAAGTGCACAACGCCAAGACCAAGCCTAGAGAGGAACA |
| | | GTACAACAGCACCTACAGAGTGGTGTCCGTGCTGACCGTGCTGCACC |
| | | AGGATTGGCTGAACGGCAAAGAGTACAAGTGCAAGGTGTCCAACAA |
| | | GGCCCTGCCTGCCCCTGAGGAAAAGACCATCAGCAAGGCCAAGGGCC |
| | | AGCCTAGGGAACCCCAGGTTTACACACTGCCTCCAAGCCGCGAGGAAATGAC |
| | | CAAGAACCAGGTGTCCCTGACCTGCCTCGTGAAGGGCTTCTACCCTTCCGAT |
| | | ATCGCCGTGGAATGGGAGAGCAATGGCCAGCCTGAGAACAACTACAAGACAA |
| | | CCCCTCCTGTGCTGGACAGCGACGGCTCATTCTTCCTGTACAGCAAGCTGAC |
| | | CGTGGACAAGTCCAGATGGCAGCAGGGCAACGTGTTCAGCTGTAGCGTGCT |
| | | GCACGAAGCCCTGCACAGCCACTACACCCAGAAAAGCCTGTCTCTGAGCCCC |
| | | GGCAAATGATAA (SEQ ID NO: 1257) |
| | Hinge (C/S)-CH2- | GAACCTAAGAGCAGCGACAAGACCCACACCTGTCCTCCATGTCCTGCTCCAG |
| | CH3 (G1m17) | AACTGCTCGGCGGACCTTCCGTGTTCCTGTTTCCTCCAAAGCCTAAG |
| | | GACACCCTGATGATCAGCAGAACCCCTGAAGTGACCTGCGTGGTGGT |
| | | GGATGTGTCTCACGAGGACCCAGAAGTGAAGTTCAATTGGTACGTGG |
| | | ACGGCGTGGAAGTGCACAACGCCAAGACCAAGCCTAGAGAGGAACA |
| | | GTACAACAGCACCTACAGAGTGGTGTCCGTGCTGACAGTGCTGCACC |
| | | AGGATTGGCTGAACGGCAAAGAGTACAAGTGCAAGGTGTCCAACAA |
| | | GGCCCTGCCTGCTCCTATCGAGAAAACCATCAGCAAGGCCAAGGGCC |
| | | AGCCTAGGGAACCCCAGGTTTACACACTGCCTCCAAGCCGCGAGGAAATGAC |
| | | CAAGAACCAGGTGTCCCTGACCTGCCTCGTGAAGGGCTTCTACCCTTCCGAT |
| | | ATCGCCGTGGAATGGGAGAGCAATGGCCAGCCTGAGAACAACTACAAGACAA |
| | | CCCCTCCTGTGCTGGACAGCGACGGCTCATTCTTCCTGTACAGCAAGCTGAC |
| | | TGTGGATAAGTCCCGGTGGCAGCAGGGCAACGTGTTCAGCTGTTCTGTGATG |
| | | CACGAAGCCCTGCACAACCACTACACCCAGAAAAGCCTGTCTCTGAGCCCCG |
| | | GCAAGTGATAA (SEQ ID NO: 1258) |
| | Hinge (C/S)-CH2- | GAACCTAAGAGCAGCGACAAGACCCACACCTGTCCTCCATGTCCTGCTCCAG |
| | CH3 (LS) (G1m17) | AACTGCTCGGCGGACCTTCCGTGTTCCTGTTTCCTCCAAAGCCTAAG |
| | | GACACCCTGATGATCAGCAGAACCCCTGAAGTGACCTGCGTGGTGGT |
| | | GGATGTGTCTCACGAGGACCCAGAAGTGAAGTTCAATTGGTACGTGG |
| | | ACGGCGTGGAAGTGCACAACGCCAAGACCAAGCCTAGAGAGGAACA |
| | | GTACAACAGCACCTACAGAGTGGTGTCCGTGCTGACAGTGCTGCACC |
| | | AGGATTGGCTGAACGGCAAAGAGTACAAGTGCAAGGTGTCCAACAA |
| | | GGCCCTGCCTGCTCCTATCGAGAAAACCATCAGCAAGGCCAAGGGCC |
| | | AGCCTAGGGAACCCCAGGTTTACACACTGCCTCCAAGCCGCGAGGAAATGAC |
| | | CAAGAACCAGGTGTCCCTGACCTGCCTCGTGAAGGGCTTCTACCCTTCCGAT |
| | | ATCGCCGTGGAATGGGAGAGCAATGGCCAGCCTGAGAACAACTACAAGACAA |
| | | CCCCTCCTGTGCTGGACAGCGACGGCTCATTCTTCCTGTACAGCAAGCTGAC |
| | | CGTGGACAAGTCCAGATGGCAGCAGGGCAACGTGTTCAGCTGTAGCGTGCT |
| | | GCACGAAGCCCTGCACAGCCACTACACCCAGAAAAGCCTGTCTCTGAGCCCC |
| | | GGCAAATGATAA (SEQ ID NO: 1259) |
| | Hinge (C/S)-CH2 | GAACCTAAGAGCAGCGACAAGACCCACACCTGTCCTCCATGTCCTGCTCCAG |
| | (GAALIE)-CH3 | AACTGCTGGCCGGACCTTCCGTGTTCCTGTTTCCTCCAAAGCCTAAG |
| | (LS) (G1m17) | GACACCCTGATGATCAGCAGAACCCCTGAAGTGACCTGCGTGGTGGT |
| | | GGATGTGTCTCACGAGGACCCTGAAGTGAAGTTCAATTGGTACGTGG |
| | | ACGGCGTGGAAGTGCACAACGCCAAGACCAAGCCTAGAGAGGAACA |
| | | GTACAACAGCACCTACAGAGTGGTGTCCGTGCTGACCGTGCTGCACC |
| | | AGGATTGGCTGAACGGCAAAGAGTACAAGTGCAAGGTGTCCAACAA |
| | | GGCCCTGCCTCTGCCTGAGGAAAAGACCATCAGCAAGGCCAAGGGCC |
| | | AGCCTAGGGAACCCCAGGTTTACACACTGCCTCCAAGCCGCGAGGAAATGAC |
| | | CAAGAACCAGGTGTCCCTGACCTGCCTCGTGAAGGGCTTCTACCCTTCCGAT |
| | | ATCGCCGTGGAATGGGAGAGCAATGGCCAGCCTGAGAACAACTACAAGACAA |
| | | CCCCTCCTGTGCTGGACAGCGACGGCTCATTCTTCCTGTACAGCAAGCTGAC |
| | | CGTGGACAAGTCCAGATGGCAGCAGGGCAACGTGTTCAGCTGTAGCGTGCT |
| | | GCACGAAGCCCTGCACAGCCACTACACCCAGAAAAGCCTGTCTCTGAGCCCC |
| | | GGCAAATGATAA (SEQ ID NO: 1260) |
| | Hinge (C/S)-CH2 | GAACCTAAGAGCAGCGACAAGACCCACACCTGTCCTCCATGTCCTGCTCCAG |
| | (GAIE)-CH3 (LS) | AACTGCTGGCCGGACCTTCCGTGTTCCTGTTTCCTCCAAAGCCTAAG |
| | (G1m17) | GACACCCTGATGATCAGCAGAACCCCTGAAGTGACCTGCGTGGTGGT |
| | | GGATGTGTCTCACGAGGACCCTGAAGTGAAGTTCAATTGGTACGTGG |
| | | ACGGCGTGGAAGTGCACAACGCCAAGACCAAGCCTAGAGAGGAACA |
| | | GTACAACAGCACCTACAGAGTGGTGTCCGTGCTGACCGTGCTGCACC |
| | | AGGATTGGCTGAACGGCAAAGAGTACAAGTGCAAGGTGTCCAACAA |
| | | GGCCCTGCCTGCCCCTGAGGAAAAGACCATCAGCAAGGCCAAGGGCC |
| | | AGCCTAGGGAACCCCAGGTTTACACACTGCCTCCAAGCCGCGAGGAAATGAC |
| | | CAAGAACCAGGTGTCCCTGACCTGCCTCGTGAAGGGCTTCTACCCTTCCGAT |
| | | ATCGCCGTGGAATGGGAGAGCAATGGCCAGCCTGAGAACAACTACAAGACAA |
| | | CCCCTCCTGTGCTGGACAGCGACGGCTCATTCTTCCTGTACAGCAAGCTGAC |
| | | CGTGGACAAGTCCAGATGGCAGCAGGGCAACGTGTTCAGCTGTAGCGTGCT |
| | | GCACGAAGCCCTGCACAGCCACTACACCCAGAAAAGCCTGTCTCTGAGCCCC |
| | | GGCAAATGATAA (SEQ ID NO: 1261) |
| | Hinge (C/S)-CH2- | GAACCTAAGAGCAGCGACAAGACCCACACCTGTCCTCCATGTCCTGCTCCAG |
| | CH3 (G1m17,1) | AACTGCTCGGCGGACCTTCCGTGTTCCTGTTTCCTCCAAAGCCTAAG |
| | | GACACCCTGATGATCAGCAGAACCCCTGAAGTGACCTGCGTGGTGGT |
| | | GGATGTGTCTCACGAGGACCCAGAAGTGAAGTTCAATTGGTACGTGG |
| | | ACGGCGTGGAAGTGCACAACGCCAAGACCAAGCCTAGAGAGGAACA |
| | | GTACAACAGCACCTACAGAGTGGTGTCCGTGCTGACAGTGCTGCACC |
| | | AGGATTGGCTGAACGGCAAAGAGTACAAGTGCAAGGTGTCCAACAA |
| | | GGCCCTGCCTGCTCCTATCGAGAAAACCATCAGCAAGGCCAAGGGCC |
| | | AGCCTAGGGAACCCCAGGTTTACACACTGCCTCCAAGCCGCGACGAACTGAC |
| | | CAAGAACCAGGTGTCCCTGACCTGCCTCGTGAAGGGCTTCTACCCTTCCGAT |
| | | ATCGCCGTGGAATGGGAGAGCAATGGCCAGCCTGAGAACAACTACAAGACAA |
| | | CCCCTCCTGTGCTGGACAGCGACGGCTCATTCTTCCTGTACAGCAAGCTGAC |
| | | TGTGGATAAGTCCCGGTGGCAGCAGGGCAACGTGTTCAGCTGTTCTGTGATG |
| | | CACGAAGCCCTGCACAACCACTACACCCAGAAAAGCCTGTCTCTGAGCCCCG |
| | | GCAAGTGATAA (SEQ ID NO: 1262) |
| | Hinge (C/S)-CH2- | GAACCTAAGAGCAGCGACAAGACCCACACCTGTCCTCCATGTCCTGCTCCAG |
| | CH3 (LS) | AACTGCTCGGCGGACCTTCCGTGTTCCTGTTTCCTCCAAAGCCTAAG |
| | (G1m17,1) | GACACCCTGATGATCAGCAGAACCCCTGAAGTGACCTGCGTGGTGGT |
| | | GGATGTGTCTCACGAGGACCCAGAAGTGAAGTTCAATTGGTACGTGG |
| | | ACGGCGTGGAAGTGCACAACGCCAAGACCAAGCCTAGAGAGGAACA |
| | | GTACAACAGCACCTACAGAGTGGTGTCCGTGCTGACAGTGCTGCACC |
| | | AGGATTGGCTGAACGGCAAAGAGTACAAGTGCAAGGTGTCCAACAA |
| | | GGCCCTGCCTGCTCCTATCGAGAAAACCATCAGCAAGGCCAAGGGCC |
| | | AGCCTAGGGAACCCCAGGTTTACACACTGCCTCCAAGCCGCGACGAACTGAC |
| | | CAAGAACCAGGTGTCCCTGACCTGCCTCGTGAAGGGCTTCTACCCTTCCGAT |
| | | ATCGCCGTGGAATGGGAGAGCAATGGCCAGCCTGAGAACAACTACAAGACAA |
| | | CCCCTCCTGTGCTGGACAGCGACGGCTCATTCTTCCTGTACAGCAAGCTGAC |
| | | CGTGGACAAGTCCAGATGGCAGCAGGGCAACGTGTTCAGCTGTAGCGTGCT |
| | | GCACGAAGCCCTGCACAGCCACTACACCCAGAAAAGCCTGTCTCTGAGCCCC |
| | | GGCAAATGATAA (SEQ ID NO: 1263) |
| | Hinge (C/S)-CH2 | GAACCTAAGAGCAGCGACAAGACCCACACCTGTCCTCCATGTCCTGCTCCAG |
| | (GAALIE)-CH3 | AACTGCTGGCCGGACCTTCCGTGTTCCTGTTTCCTCCAAAGCCTAAG |
| | (LS) (G1m17,1) | GACACCCTGATGATCAGCAGAACCCCTGAAGTGACCTGCGTGGTGGT |
| | | GGATGTGTCTCACGAGGACCCTGAAGTGAAGTTCAATTGGTACGTGG |
| | | ACGGCGTGGAAGTGCACAACGCCAAGACCAAGCCTAGAGAGGAACA |
| | | GTACAACAGCACCTACAGAGTGGTGTCCGTGCTGACCGTGCTGCACC |
| | | AGGATTGGCTGAACGGCAAAGAGTACAAGTGCAAGGTGTCCAACAA |
| | | GGCCCTGCCTCTGCCTGAGGAAAAGACCATCAGCAAGGCCAAGGGCC |
| | | AGCCTAGGGAACCCCAGGTTTACACACTGCCTCCAAGCCGCGACGAACTGAC |
| | | CAAGAACCAGGTGTCCCTGACCTGCCTCGTGAAGGGCTTCTACCCTTCCGAT |
| | | ATCGCCGTGGAATGGGAGAGCAATGGCCAGCCTGAGAACAACTACAAGACAA |
| | | CCCCTCCTGTGCTGGACAGCGACGGCTCATTCTTCCTGTACAGCAAGCTGAC |
| | | CGTGGACAAGTCCAGATGGCAGCAGGGCAACGTGTTCAGCTGTAGCGTGCT |
| | | GCACGAAGCCCTGCACAGCCACTACACCCAGAAAAGCCTGTCTCTGAGCCCC |
| | | GGCAAATGATAA (SEQ ID NO: 1264) |
| | Hinge (C/S)-CH2 | GAACCTAAGAGCAGCGACAAGACCCACACCTGTCCTCCATGTCCTGCTCCAG |
| | (GAIE)-CH3 (LS) | AACTGCTGGCCGGACCTTCCGTGTTCCTGTTTCCTCCAAAGCCTAAG |
| | (G1m17,1) | GACACCCTGATGATCAGCAGAACCCCTGAAGTGACCTGCGTGGTGGT |
| | | GGATGTGTCTCACGAGGACCCTGAAGTGAAGTTCAATTGGTACGTGG |
| | | ACGGCGTGGAAGTGCACAACGCCAAGACCAAGCCTAGAGAGGAACA |
| | | GTACAACAGCACCTACAGAGTGGTGTCCGTGCTGACCGTGCTGCACC |
| | | AGGATTGGCTGAACGGCAAAGAGTACAAGTGCAAGGTGTCCAACAA |
| | | GGCCCTGCCTGCCCCTGAGGAAAAGACCATCAGCAAGGCCAAGGGCC |
| | | AGCCTAGGGAACCCCAGGTTTACACACTGCCTCCAAGCCGCGACGAACTGAC |
| | | CAAGAACCAGGTGTCCCTGACCTGCCTCGTGAAGGGCTTCTACCCTTCCGAT |
| | | ATCGCCGTGGAATGGGAGAGCAATGGCCAGCCTGAGAACAACTACAAGACAA |
| | | CCCCTCCTGTGCTGGACAGCGACGGCTCATTCTTCCTGTACAGCAAGCTGAC |
| | | CGTGGACAAGTCCAGATGGCAGCAGGGCAACGTGTTCAGCTGTAGCGTGCT |
| | | GCACGAAGCCCTGCACAGCCACTACACCCAGAAAAGCCTGTCTCTGAGCCCC |
| | | GGCAAATGATAA (SEQ ID NO: 1265) |

### Plasmid DNA Preparation

[1420] Plasmid DNA is prepared by selecting E. coli clones for inoculation in Luria-Bertani (LB) medium containing kanamycin. The cultures are grown overnight at 37° C. and ~150 to 200 rpm. Following cell harvest, purification is done using the QIAGEN Plasmid Plus Maxi Kit according to the manufacturer's instructions. Finally, the concentration is determined by UV spectroscopy. DNA is stored in certified RNase- and DNase-free reaction tubes.

### Linearization and DNA Purification

[1421] Linearization of plasmid DNA is performed using appropriate restriction enzymes, followed by purification of the linearized DNA template using magnetic beads (Dynabeads™ MyOne™ Carboxylic Acid) according to the manufacturer's protocol. The DNA concentration is measured by UV spectroscopy.

### In Vitro Transcription

[1422] CleanCap 413 (m7(3′OMeG)(5′)ppp(5′)(2′OMeA)pG) capped RNA is produced following the process as disclosed, e.g., in WO 2021214204A1, which is incorporated herein by reference in its entirety. Methyl pseudo-uridine is used in the in vitro transcription reaction and incorporated into the produced RNA. Cellulose purification of the resulting RNA is performed to isolate single-stranded RNA, followed by concentration measurement by UV spectroscopy. The RNA integrity is determined by microfluidic-based electrophoresis.

### Example 11: Generation of Polyribonucleotides Encoding PGDM1400 Monospecific CrossMab^{CH1-CLx} and PGDM1400 Monospecific CrossMab^{CH1-CLcv}

[1423] In this Example, polyribonucleotides encoding PGDM1400 in CrossMab^{CH1-CLx} format (as illustrated e.g., in FIG. 4, Panel B) are generated. In CrossMab^{CH1-CLx} format, a CH₁ domain is fused to a VL and a CL domain is fused in between a VH and a CH₂-CH₃ set of domains. By introducing these domain swaps, the resulting CrossMab^{CH1-CLx} Chains will specifically pair, while strongly inhibiting binding to wild-type or unmodified immunoglobulin chains. Thus, with this format, non-functional mispairings are strongly reduced.

[1424] Polyribonucleotides encoding PGDM1400 in CrossMab^{CH1-CLcv} format (as illustrated e.g., in FIG. 4, Panel D) are also generated. In CrossMab^{CH1-CLcv} format, a VL is operably linked to a CL domain and a VH is operably linked to a CH₁-CH₂-CH₃ set of domains. To minimize incorrect chain pairing, the CL domain of the immunoglobulin light chain and the CH₁ domain of the immunoglobulin heavy chain are modified to include charge variants, which promote pairing of a constant domain with a positive charge to a constant domain with a negative charge. Exemplary PGDM1400 antibody agent configurations and component immunoglobulin chains are shown in Tables 3 and 4.

[1425] Polyribonucleotides encoding the CrossMab^{CH1-CLx} and CrossMab^{CH1-CLcv} formats are cloned into the JR81 vector.

[1426] Objectives of the present Example include:
[1427] (1) Clone PGDM1400 CrossMab^{CH1-CLx}-encoding DNA Fragment Strings into JR81 backbone; and
[1428] (2) Clone PGDM1400 CrossMab^{CH1/CLcv}-encoding DNA Fragment Strings into JR81 backbone.

[1429] The methods of the present example include: (1) cloning of DNA fragments into appropriate RNA-expression vector; and (2) verification of selected clones by control digestion and sequencing.

### Codon Optimization and Cloning Strategy

[1430] Codon optimization and cloning are performed as described above in Example 9.

[1431] Exemplary sequences used in the cloning methods for PGDM1400 CrossMab^{CH1-CLx}-encoding DNA Fragment Strings are shown in Table 21 below.

TABLE 21
Exemplary sequences in PGDM1400 CrossMabCH1-CLx encoding polyribonucleotides.

| Feature | Fragment | Nucleotide Sequence |
|---|---|---|
| General | CH1(SS) (G1m17) | AGCAGCGCCTCTACAAAGGGCCCCAGCGTTTTCCCACTGGCTCCT |
| | | AGCAGCAAGAGCACATCTGGCGGAACAGCCGCTCTGGGCTGTCT |
| | | GGTCAAGGACTACTTTCCCGAGCCTGTGACCGTGTCCTGGAATTC |
| | | TGGCGCTCTGACATCCGGCGTGCACACCTTTCCAGCTGTGCTGCA |
| | | AAGCAGCGGCCTGTACTCTCTGAGCAGCGTGGTCACAGTGCCAAG |
| | | CTCTAGCCTGGGCACCCAGACCTACATCTGCAATGTGAACCACAA |
| | | GCCTAGCAACACGAAGGTCGACAAGAAGGTGGAACCCAAGTCCTG |
| | | CTGATAA (SEQ ID NO: 1266) |
| | Hinge (ΔEPKSC)-CH2-CH3 | GATAAGACCCACACCTGTCCTCCATGTCCAGCTCCAGAACTGCT |
| | (G1m3) | CGGCGGACCTTCCGTGTTCCTGTTTCCTCCAAAGCCTAAGG |
| | | ACACCCTGATGATCAGCAGAACCCCTGAAGTGACCTGCGT |
| | | GGTGGTGGATGTGTCTCACGAGGACCCAGAAGTGAAGTTC |
| | | AATTGGTACGTGGACGGCGTGGAAGTGCACAACGCCAAGA |
| | | CCAAGCCTAGAGAGGAACAGTACAACAGCACCTACAGAGT |
| | | GGTGTCCGTGCTGACAGTGCTGCACCAGGATTGGCTGAAC |
| | | GGCAAAGAGTACAAGTGCAAGGTGTCCAACAAGGCCCTGC |
| | | CTGCTCCTATCGAGAAAACCATCAGCAAGGCCAAGGGCCAG |
| | | CCTAGGGAACCCCAGGTTTACACACTGCCTCCAAGCCGCGAGGAA |
| | | ATGACCAAGAACCAGGTGTCCCTGACCTGCCTCGTGAAGGGCTTC |
| | | TACCCTTCCGATATCGCCGTGGAATGGGAGAGCAATGGCCAGCCT |
| | | GAGAACAACTACAAGACAACCCCTCCTGTGCTGGACAGCGACGGC |
| | | TCATTCTTCCTGTACAGCAAGCTGACTGTGGATAAGTCCCGGTGG |
| | | CAGCAGGGCAACGTGTTCAGCTGTTCTGTGATGCACGAAGCCCTG |
| | | CACAACCACTACACCCAGAAAAGCCTGTCTCTGAGCCCCGGCAAG |
| | | TGATAA (SEQ ID NO: 1267) |
| | Hinge (ΔEPKSC)-CH2-CH3 | GATAAGACCCACACCTGTCCTCCATGTCCAGCTCCAGAACTGCT |
| | (G1m17) | CGGCGGACCTTCCGTGTTCCTGTTTCCTCCAAAGCCTAAGG |
| | | ACACCCTGATGATCAGCAGAACCCCTGAAGTGACCTGCGT |
| | | GGTGGTGGATGTGTCTCACGAGGACCCAGAAGTGAAGTTC |
| | | AATTGGTACGTGGACGGCGTGGAAGTGCACAACGCCAAGA |
| | | CCAAGCCTAGAGAGGAACAGTACAACAGCACCTACAGAGT |
| | | GGTGTCCGTGCTGACAGTGCTGCACCAGGATTGGCTGAAC |
| | | GGCAAAGAGTACAAGTGCAAGGTGTCCAACAAGGCCCTGC |
| | | CTGCTCCTATCGAGAAAACCATCAGCAAGGCCAAGGGCCAG |
| | | CCTAGGGAACCCCAGGTTTACACACTGCCTCCAAGCCGCGAGGAA |
| | | ATGACCAAGAACCAGGTGTCCCTGACCTGCCTCGTGAAGGGCTTC |
| | | TACCCTTCCGATATCGCCGTGGAATGGGAGAGCAATGGCCAGCCT |
| | | GAGAACAACTACAAGACAACCCCTCCTGTGCTGGACAGCGACGGC |
| | | TCATTCTTCCTGTACAGCAAGCTGACTGTGGATAAGTCCCGGTGG |
| | | CAGCAGGGCAACGTGTTCAGCTGTTCTGTGATGCACGAAGCCCTG |
| | | CACAACCACTACACCCAGAAAAGCCTGTCTCTGAGCCCCGGCAAG |
| | | TGATAA (SEQ ID NO: 1268) |
| | Hinge (ΔEPKSC)-CH2-CH3 | GATAAGACCCACACCTGTCCTCCATGTCCAGCTCCAGAACTGCT |
| | (LS) (G1m17) | CGGCGGACCTTCCGTGTTCCTGTTTCCTCCAAAGCCTAAGG |
| | | ACACCCTGATGATCAGCAGAACCCCTGAAGTGACCTGCGT |
| | | GGTGGTGGATGTGTCTCACGAGGACCCAGAAGTGAAGTTC |
| | | AATTGGTACGTGGACGGCGTGGAAGTGCACAACGCCAAGA |
| | | CCAAGCCTAGAGAGGAACAGTACAACAGCACCTACAGAGT |
| | | GGTGTCCGTGCTGACAGTGCTGCACCAGGATTGGCTGAAC |
| | | GGCAAAGAGTACAAGTGCAAGGTGTCCAACAAGGCCCTGC |
| | | CTGCTCCTATCGAGAAAACCATCAGCAAGGCCAAGGGCCAG |
| | | CCTAGGGAACCCCAGGTTTACACACTGCCTCCAAGCCGCGAGGAA |
| | | ATGACCAAGAACCAGGTGTCCCTGACCTGCCTCGTGAAGGGCTTC |
| | | TACCCTTCCGATATCGCCGTGGAATGGGAGAGCAATGGCCAGCCT |
| | | GAGAACAACTACAAGACAACCCCTCCTGTGCTGGACAGCGACGGC |
| | | TCATTCTTCCTGTACAGCAAGCTGACCGTGGACAAGTCCAGATGG |
| | | CAGCAGGGCAACGTGTTCAGCTGTAGCGTGCTGCACGAAGCCCTG |
| | | CACAGCCACTACACCCAGAAAAGCCTGTCTCTGAGCCCCGGCAAA |
| | | TGATAA (SEQ ID NO: 1269) |
| | Hinge (ΔEPKSC)-CH2-CH3 | GATAAGACCCACACCTGTCCTCCATGTCCAGCTCCAGAACTGCT |
| | (G1m17,1) | CGGCGGACCTTCCGTGTTCCTGTTTCCTCCAAAGCCTAAGG |
| | | ACACCCTGATGATCAGCAGAACCCCTGAAGTGACCTGCGT |
| | | GGTGGTGGATGTGTCTCACGAGGACCCAGAAGTGAAGTTC |
| | | AATTGGTACGTGGACGGCGTGGAAGTGCACAACGCCAAGA |
| | | CCAAGCCTAGAGAGGAACAGTACAACAGCACCTACAGAGT |
| | | GGTGTCCGTGCTGACAGTGCTGCACCAGGATTGGCTGAAC |
| | | GGCAAAGAGTACAAGTGCAAGGTGTCCAACAAGGCCCTGC |
| | | CTGCTCCTATCGAGAAAACCATCAGCAAGGCCAAGGGCCAG |
| | | CCTAGGGAACCCCAGGTTTACACACTGCCTCCAAGCCGCGACGAA |
| | | CTGACCAAGAACCAGGTGTCCCTGACCTGCCTCGTGAAGGGCTTC |
| | | TACCCTTCCGATATCGCCGTGGAATGGGAGAGCAATGGCCAGCCT |
| | | GAGAACAACTACAAGACAACCCCTCCTGTGCTGGACAGCGACGGC |
| | | TCATTCTTCCTGTACAGCAAGCTGACTGTGGATAAGTCCCGGTGG |
| | | CAGCAGGGCAACGTGTTCAGCTGTTCTGTGATGCACGAAGCCCTG |
| | | CACAACCACTACACCCAGAAAAGCCTGTCTCTGAGCCCCGGCAAG |
| | | TGATAA (SEQ ID NO: 1270) |
| | Hinge (ΔEPKSC)-CH2-CH3 | GATAAGACCCACACCTGTCCTCCATGTCCAGCTCCAGAACTGCT |
| | (LS) (G1m17,1) | CGGCGGACCTTCCGTGTTCCTGTTTCCTCCAAAGCCTAAGG |
| | | ACACCCTGATGATCAGCAGAACCCCTGAAGTGACCTGCGT |
| | | GGTGGTGGATGTGTCTCACGAGGACCCAGAAGTGAAGTTC |
| | | AATTGGTACGTGGACGGCGTGGAAGTGCACAACGCCAAGA |
| | | CCAAGCCTAGAGAGGAACAGTACAACAGCACCTACAGAGT |
| | | GGTGTCCGTGCTGACAGTGCTGCACCAGGATTGGCTGAAC |
| | | GGCAAAGAGTACAAGTGCAAGGTGTCCAACAAGGCCCTGC |
| | | CTGCTCCTATCGAGAAAACCATCAGCAAGGCCAAGGGCCAG |
| | | CCTAGGGAACCCCAGGTTTACACACTGCCTCCAAGCCGCGACGAA |
| | | CTGACCAAGAACCAGGTGTCCCTGACCTGCCTCGTGAAGGGCTTC |
| | | TACCCTTCCGATATCGCCGTGGAATGGGAGAGCAATGGCCAGCCT |
| | | GAGAACAACTACAAGACAACCCCTCCTGTGCTGGACAGCGACGGC |
| | | TCATTCTTCCTGTACAGCAAGCTGACCGTGGACAAGTCCAGATGG |
| | | CAGCAGGGCAACGTGTTCAGCTGTAGCGTGCTGCACGAAGCCCTG |
| | | CACAGCCACTACACCCAGAAAAGCCTGTCTCTGAGCCCCGGCAAA |
| | | TGATAA (SEQ ID NO: 1271) |
| General | CH1(SS) (G1m17) | AGCAGCGCCTCTACAAAGGGCCCCAGCGTTTTCCCACTGGCTCCT |
| | | AGCAGCAAGAGCACATCTGGCGGAACAGCCGCTCTGGGCTGTCT |
| | | GGTCAAGGACTACTTTCCCGAGCCTGTGACCGTGTCCTGGAATTC |
| | | TGGCGCTCTGACATCCGGCGTGCACACCTTTCCAGCTGTGCTGCA |
| | | AAGCAGCGGCCTGTACTCTCTGAGCAGCGTGGTCACAGTGCCAAG |
| | | CTCTAGCCTGGGCACCCAGACCTACATCTGCAATGTGAACCACAA |
| | | GCCTAGCAACACGAAGGTCGACAAGAAGGTGGAACCCAAGTCCTG |
| | | CTGATAA (SEQ ID NO: 1272) |
| | Hinge (ΔEPKSC)-CH2-CH3 | GATAAGACCCACACCTGTCCTCCATGTCCAGCTCCAGAACTGCT |
| | (G1m3) | CGGCGGACCTTCCGTGTTCCTGTTTCCTCCAAAGCCTAAGG |
| | | ACACCCTGATGATCAGCAGAACCCCTGAAGTGACCTGCGT |
| | | GGTGGTGGATGTGTCTCACGAGGACCCAGAAGTGAAGTTC |
| | | AATTGGTACGTGGACGGCGTGGAAGTGCACAACGCCAAGA |
| | | CCAAGCCTAGAGAGGAACAGTACAACAGCACCTACAGAGT |
| | | GGTGTCCGTGCTGACAGTGCTGCACCAGGATTGGCTGAAC |
| | | GGCAAAGAGTACAAGTGCAAGGTGTCCAACAAGGCCCTGC |
| | | CTGCTCCTATCGAGAAAACCATCAGCAAGGCCAAGGGCCAG |
| | | CCTAGGGAACCCCAGGTTTACACACTGCCTCCAAGCCGCGAGGAA |
| | | ATGACCAAGAACCAGGTGTCCCTGACCTGCCTCGTGAAGGGCTTC |
| | | TACCCTTCCGATATCGCCGTGGAATGGGAGAGCAATGGCCAGCCT |
| | | GAGAACAACTACAAGACAACCCCTCCTGTGCTGGACAGCGACGGC |
| | | TCATTCTTCCTGTACAGCAAGCTGACTGTGGATAAGTCCCGGTGG |
| | | CAGCAGGGCAACGTGTTCAGCTGTTCTGTGATGCACGAAGCCCTG |
| | | CACAACCACTACACCCAGAAAAGCCTGTCTCTGAGCCCCGGCAAG |
| | | TGATAA (SEQ ID NO: 1273) |
| | Hinge (ΔEPKSC)-CH2-CH3 | GATAAGACCCACACCTGTCCTCCATGTCCAGCTCCAGAACTGCT |
| | (G1m17) | CGGCGGACCTTCCGTGTTCCTGTTTCCTCCAAAGCCTAAGG |
| | | ACACCCTGATGATCAGCAGAACCCCTGAAGTGACCTGCGT |
| | | GGTGGTGGATGTGTCTCACGAGGACCCAGAAGTGAAGTTC |
| | | AATTGGTACGTGGACGGCGTGGAAGTGCACAACGCCAAGA |
| | | CCAAGCCTAGAGAGGAACAGTACAACAGCACCTACAGAGT |
| | | GGTGTCCGTGCTGACAGTGCTGCACCAGGATTGGCTGAAC |
| | | GGCAAAGAGTACAAGTGCAAGGTGTCCAACAAGGCCCTGC |
| | | CTGCTCCTATCGAGAAAACCATCAGCAAGGCCAAGGGCCAG |
| | | CCTAGGGAACCCCAGGTTTACACACTGCCTCCAAGCCGCGAGGAA |
| | | ATGACCAAGAACCAGGTGTCCCTGACCTGCCTCGTGAAGGGCTTC |
| | | TACCCTTCCGATATCGCCGTGGAATGGGAGAGCAATGGCCAGCCT |
| | | GAGAACAACTACAAGACAACCCCTCCTGTGCTGGACAGCGACGGC |
| | | TCATTCTTCCTGTACAGCAAGCTGACTGTGGATAAGTCCCGGTGG |
| | | CAGCAGGGCAACGTGTTCAGCTGTTCTGTGATGCACGAAGCCCTG |
| | | CACAACCACTACACCCAGAAAAGCCTGTCTCTGAGCCCCGGCAAG |
| | | TGATAA (SEQ ID NO: 1274) |
| | Hinge (ΔEPKSC)-CH2-CH3 | GATAAGACCCACACCTGTCCTCCATGTCCAGCTCCAGAACTGCT |
| | (LS) (G1m17) | CGGCGGACCTTCCGTGTTCCTGTTTCCTCCAAAGCCTAAGG |
| | | ACACCCTGATGATCAGCAGAACCCCTGAAGTGACCTGCGT |
| | | GGTGGTGGATGTGTCTCACGAGGACCCAGAAGTGAAGTTC |
| | | AATTGGTACGTGGACGGCGTGGAAGTGCACAACGCCAAGA |
| | | CCAAGCCTAGAGAGGAACAGTACAACAGCACCTACAGAGT |
| | | GGTGTCCGTGCTGACAGTGCTGCACCAGGATTGGCTGAAC |
| | | GGCAAAGAGTACAAGTGCAAGGTGTCCAACAAGGCCCTGC |
| | | CTGCTCCTATCGAGAAAACCATCAGCAAGGCCAAGGGCCAG |
| | | CCTAGGGAACCCCAGGTTTACACACTGCCTCCAAGCCGCGAGGAA |
| | | ATGACCAAGAACCAGGTGTCCCTGACCTGCCTCGTGAAGGGCTTC |
| | | TACCCTTCCGATATCGCCGTGGAATGGGAGAGCAATGGCCAGCCT |
| | | GAGAACAACTACAAGACAACCCCTCCTGTGCTGGACAGCGACGGC |
| | | TCATTCTTCCTGTACAGCAAGCTGACCGTGGACAAGTCCAGATGG |
| | | CAGCAGGGCAACGTGTTCAGCTGTAGCGTGCTGCACGAAGCCCTG |
| | | CACAGCCACTACACCCAGAAAAGCCTGTCTCTGAGCCCCGGCAAA |
| | | TGATAA (SEQ ID NO: 1275) |
| | Hinge (ΔEPKSC)-CH2-CH3 | GATAAGACCCACACCTGTCCTCCATGTCCAGCTCCAGAACTGCT |
| | (G1m17,1) | CGGCGGACCTTCCGTGTTCCTGTTTCCTCCAAAGCCTAAGG |
| | | ACACCCTGATGATCAGCAGAACCCCTGAAGTGACCTGCGT |
| | | GGTGGTGGATGTGTCTCACGAGGACCCAGAAGTGAAGTTC |
| | | AATTGGTACGTGGACGGCGTGGAAGTGCACAACGCCAAGA |
| | | CCAAGCCTAGAGAGGAACAGTACAACAGCACCTACAGAGT |
| | | GGTGTCCGTGCTGACAGTGCTGCACCAGGATTGGCTGAAC |
| | | GGCAAAGAGTACAAGTGCAAGGTGTCCAACAAGGCCCTGC |
| | | CTGCTCCTATCGAGAAAACCATCAGCAAGGCCAAGGGCCAG |
| | | CCTAGGGAACCCCAGGTTTACACACTGCCTCCAAGCCGCGACGAA |
| | | CTGACCAAGAACCAGGTGTCCCTGACCTGCCTCGTGAAGGGCTTC |
| | | TACCCTTCCGATATCGCCGTGGAATGGGAGAGCAATGGCCAGCCT |
| | | GAGAACAACTACAAGACAACCCCTCCTGTGCTGGACAGCGACGGC |
| | | TCATTCTTCCTGTACAGCAAGCTGACTGTGGATAAGTCCCGGTGG |
| | | CAGCAGGGCAACGTGTTCAGCTGTTCTGTGATGCACGAAGCCCTG |
| | | CACAACCACTACACCCAGAAAAGCCTGTCTCTGAGCCCCGGCAAG |
| | | TGATAA (SEQ ID NO: 1276) |
| | Hinge (ΔEPKSC)-CH2-CH3 | GATAAGACCCACACCTGTCCTCCATGTCCAGCTCCAGAACTGCT |
| | (LS) (G1m17,1) | CGGCGGACCTTCCGTGTTCCTGTTTCCTCCAAAGCCTAAGG |
| | | ACACCCTGATGATCAGCAGAACCCCTGAAGTGACCTGCGT |
| | | GGTGGTGGATGTGTCTCACGAGGACCCAGAAGTGAAGTTC |
| | | AATTGGTACGTGGACGGCGTGGAAGTGCACAACGCCAAGA |
| | | CCAAGCCTAGAGAGGAACAGTACAACAGCACCTACAGAGT |
| | | GGTGTCCGTGCTGACAGTGCTGCACCAGGATTGGCTGAAC |
| | | GGCAAAGAGTACAAGTGCAAGGTGTCCAACAAGGCCCTGC |
| | | CTGCTCCTATCGAGAAAACCATCAGCAAGGCCAAGGGCCAG |
| | | CCTAGGGAACCCCAGGTTTACACACTGCCTCCAAGCCGCGACGAA |
| | | CTGACCAAGAACCAGGTGTCCCTGACCTGCCTCGTGAAGGGCTTC |
| | | TACCCTTCCGATATCGCCGTGGAATGGGAGAGCAATGGCCAGCCT |
| | | GAGAACAACTACAAGACAACCCCTCCTGTGCTGGACAGCGACGGC |
| | | TCATTCTTCCTGTACAGCAAGCTGACCGTGGACAAGTCCAGATGG |
| | | CAGCAGGGCAACGTGTTCAGCTGTAGCGTGCTGCACGAAGCCCTG |
| | | CACAGCCACTACACCCAGAAAAGCCTGTCTCTGAGCCCCGGCAAA |
| | | TGATAA (SEQ ID NO: 1277) |

[1432] Exemplary sequences used in the cloning methods for PGDM1400 CrossMabCH1-CLx-encoding DNA Fragment Strings are shown in Table 22 below.

TABLE 22
Exemplary sequences in PGDM1400 CrossMab^{CH1-CLcv} encoding_polyribonucleotides.

| Feature | Fragment | Nucleotide Sequence |
|---|---|---|
| General | CH1cv (G1m17) | GCTTCCACAAAGGGCCCTAGCGTGTTCCCTCTGGCTCCTAGCAGC |
| | | AAGTCTACAAGCGGAGGAACAGCTGCCCTGGGCTGCCTGGTGGA |
| | | AGATTACTTTCCTGAGCCTGTGACCGTGTCCTGGAACAGCGGTGC |
| | | TCTGACTTCTGGCGTGCACACCTTTCCAGCCGTGCTGCAAAGCAG |
| | | CGGCCTGTACTCTCTGAGCAGCGTGGTCACAGTGCCAAGCTCTAG |
| | | CCTGGGCACCCAGACCTACATCTGCAATGTGAACCACAAGCCTAG |
| | | CAACACCAAGGTGGACGACAAGGTG (SEQ ID NO: 1278) |
| | CH1cv (G1m17,1) | GCTTCCACAAAGGGCCCTAGCGTGTTCCCTCTGGCTCCTAGCAGC |
| | | AAGTCTACAAGCGGAGGAACAGCTGCCCTGGGCTGCCTGGTGGA |
| | | AGATTACTTTCCTGAGCCTGTGACCGTGTCCTGGAACAGCGGTGC |
| | | TCTGACTTCTGGCGTGCACACCTTTCCAGCCGTGCTGCAAAGCAG |
| | | CGGCCTGTACTCTCTGAGCAGCGTGGTCACAGTGCCAAGCTCTAG |
| | | CCTGGGCACCCAGACCTACATCTGCAATGTGAACCACAAGCCTAG |
| | | CAACACCAAGGTGGACGACAAGGTG (SEQ ID NO: 1279) |
| | Hinge-CH2-CH3 (G1m3) | GAACCCAAGAGCTGCGACAAGACCCACACCTGTCCTCCATGTCCT |
| | | GCTCCAGAACTGCTCGGCGGACCTTCCGTGTTCCTGTTTCC |
| | | TCCAAAGCCTAAGGACACCCTGATGATCAGCAGAACCCCTG |
| | | AAGTGACCTGCGTGGTGGTGGATGTGTCTCACGAGGACCC |
| | | AGAAGTGAAGTTCAATTGGTACGTGGACGGCGTGGAAGTG |
| | | CACAACGCCAAGACCAAGCCTAGAGAGGAACAGTACAACA |
| | | GCACCTACAGAGTGGTGTCCGTGCTGACAGTGCTGCACCA |
| | | GGATTGGCTGAACGGCAAAGAGTACAAGTGCAAGGTGTCC |
| | | AACAAGGCCCTGCCTGCTCCTATCGAGAAAACCATCAGCAA |
| | | GGCCAAGGGCCAGCCTAGGGAACCCCAGGTTTACACACTGCCTC |
| | | CAAGCCGCGAGGAAATGACCAAGAACCAGGTGTCCCTGACCTGCC |
| | | TCGTGAAGGGCTTCTACCCTTCCGATATCGCCGTGGAATGGGAGA |
| | | GCAATGGCCAGCCTGAGAACAACTACAAGACAACCCCTCCTGTGC |
| | | TGGACAGCGACGGCTCATTCTTCCTGTACAGCAAGCTGACTGTGG |
| | | ATAAGTCCCGGTGGCAGCAGGGCAACGTGTTCAGCTGTTCTGTGA |
| | | TGCACGAAGCCCTGCACAACCACTACACCCAGAAAAGCCTGTCTC |
| | | TGAGCCCCGGCAAGTGATAA (SEQ ID NO: 1280) |
| | Hinge-CH2 (GAIE)-CH3 | GAACCCAAGAGCTGCGACAAGACCCACACCTGTCCTCCATGTCCT |
| | (LS) (G1m3) | GCTCCAGAACTGCTGGCCGGACCTTCCGTGTTCCTGTTTCC |
| | | TCCAAAGCCTAAGGACACCCTGATGATCAGCAGAACCCCTG |
| | | AAGTGACCTGCGTGGTGGTGGATGTGTCTCACGAGGACCC |
| | | TGAAGTGAAGTTCAATTGGTACGTGGACGGCGTGGAAGTG |
| | | CACAACGCCAAGACCAAGCCTAGAGAGGAACAGTACAACA |
| | | GCACCTACAGAGTGGTGTCCGTGCTGACCGTGCTGCACCA |
| | | GGATTGGCTGAACGGCAAAGAGTACAAGTGCAAGGTGTCC |
| | | AACAAGGCCCTGCCTGCCCCTGAGGAAAAGACCATCAGCA |
| | | AGGCCAAGGGCCAGCCTAGGGAACCCCAGGTTTACACACTGCCT |
| | | CCAAGCCGCGAGGAAATGACCAAGAACCAGGTGTCCCTGACCTGC |
| | | CTCGTGAAGGGCTTCTACCCTTCCGATATCGCCGTGGAATGGGAG |
| | | AGCAATGGCCAGCCTGAGAACAACTACAAGACAACCCCTCCTGTG |
| | | CTGGACAGCGACGGCTCATTCTTCCTGTACAGCAAGCTGACCGTG |
| | | GACAAGTCCAGATGGCAGCAGGGCAACGTGTTCAGCTGTAGCGT |
| | | GCTGCACGAAGCCCTGCACAGCCACTACACCCAGAAAAGCCTGTC |
| | | TCTGAGCCCCGGCAAATGATAA (SEQ ID NO: 1281) |
| | Hinge-CH2-CH3 (G1m17) | GAACCCAAGAGCTGCGACAAGACCCACACCTGTCCTCCATGTCCT |
| | | GCTCCAGAACTGCTCGGCGGACCTTCCGTGTTCCTGTTTCC |
| | | TCCAAAGCCTAAGGACACCCTGATGATCAGCAGAACCCCTG |
| | | AAGTGACCTGCGTGGTGGTGGATGTGTCTCACGAGGACCC |
| | | AGAAGTGAAGTTCAATTGGTACGTGGACGGCGTGGAAGTG |
| | | CACAACGCCAAGACCAAGCCTAGAGAGGAACAGTACAACA |
| | | GCACCTACAGAGTGGTGTCCGTGCTGACAGTGCTGCACCA |
| | | GGATTGGCTGAACGGCAAAGAGTACAAGTGCAAGGTGTCC |
| | | AACAAGGCCCTGCCTGCTCCTATCGAGAAAACCATCAGCAA |
| | | GGCCAAGGGCCAGCCTAGGGAACCCCAGGTTTACACACTGCCTC |
| | | CAAGCCGCGAGGAAATGACCAAGAACCAGGTGTCCCTGACCTGCC |
| | | TCGTGAAGGGCTTCTACCCTTCCGATATCGCCGTGGAATGGGAGA |
| | | GCAATGGCCAGCCTGAGAACAACTACAAGACAACCCCTCCTGTGC |
| | | TGGACAGCGACGGCTCATTCTTCCTGTACAGCAAGCTGACTGTGG |
| | | ATAAGTCCCGGTGGCAGCAGGGCAACGTGTTCAGCTGTTCTGTGA |
| | | TGCACGAAGCCCTGCACAACCACTACACCCAGAAAAGCCTGTCTC |
| | | TGAGCCCCGGCAAGTGATAA (SEQ ID NO: 1282) |
| | Hinge-CH2-CH3 (LS) | GAACCCAAGAGCTGCGACAAGACCCACACCTGTCCTCCATGTCCT |
| | (G1m17) | GCTCCAGAACTGCTCGGCGGACCTTCCGTGTTCCTGTTTCC |
| | | TCCAAAGCCTAAGGACACCCTGATGATCAGCAGAACCCCTG |
| | | AAGTGACCTGCGTGGTGGTGGATGTGTCTCACGAGGACCC |
| | | AGAAGTGAAGTTCAATTGGTACGTGGACGGCGTGGAAGTG |
| | | CACAACGCCAAGACCAAGCCTAGAGAGGAACAGTACAACA |
| | | GCACCTACAGAGTGGTGTCCGTGCTGACAGTGCTGCACCA |
| | | GGATTGGCTGAACGGCAAAGAGTACAAGTGCAAGGTGTCC |
| | | AACAAGGCCCTGCCTGCTCCTATCGAGAAAACCATCAGCAA |
| | | GGCCAAGGGCCAGCCTAGGGAACCCCAGGTTTACACACTGCCTC |
| | | CAAGCCGCGAGGAAATGACCAAGAACCAGGTGTCCCTGACCTGCC |
| | | TCGTGAAGGGCTTCTACCCTTCCGATATCGCCGTGGAATGGGAGA |
| | | GCAATGGCCAGCCTGAGAACAACTACAAGACAACCCCTCCTGTGC |
| | | TGGACAGCGACGGCTCATTCTTCCTGTACAGCAAGCTGACCGTGG |
| | | ACAAGTCCAGATGGCAGCAGGGCAACGTGTTCAGCTGTAGCGTGC |
| | | TGCACGAAGCCCTGCACAGCCACTACACCCAGAAAAGCCTGTCTC |
| | | TGAGCCCCGGCAAATGATAA (SEQ ID NO: 1283) |
| | Hinge-CH2 (GAALIE)-CH3 | GAACCCAAGAGCTGCGACAAGACCCACACCTGTCCTCCATGTCCT |
| | (LS) (G1m17) | GCTCCAGAACTGCTGGCCGGACCTTCCGTGTTCCTGTTTCC |
| | | TCCAAAGCCTAAGGACACCCTGATGATCAGCAGAACCCCTG |
| | | AAGTGACCTGCGTGGTGGTGGATGTGTCTCACGAGGACCC |
| | | TGAAGTGAAGTTCAATTGGTACGTGGACGGCGTGGAAGTG |
| | | CACAACGCCAAGACCAAGCCTAGAGAGGAACAGTACAACA |
| | | GCACCTACAGAGTGGTGTCCGTGCTGACCGTGCTGCACCA |
| | | GGATTGGCTGAACGGCAAAGAGTACAAGTGCAAGGTGTCC |
| | | AACAAGGCCCTGCCTCTGCCTGAGGAAAAGACCATCAGCA |
| | | AGGCCAAGGGCCAGCCTAGGGAACCCCAGGTTTACACACTGCCT |
| | | CCAAGCCGCGAGGAAATGACCAAGAACCAGGTGTCCCTGACCTGC |
| | | CTCGTGAAGGGCTTCTACCCTTCCGATATCGCCGTGGAATGGGAG |
| | | AGCAATGGCCAGCCTGAGAACAACTACAAGACAACCCCTCCTGTG |
| | | CTGGACAGCGACGGCTCATTCTTCCTGTACAGCAAGCTGACCGTG |
| | | GACAAGTCCAGATGGCAGCAGGGCAACGTGTTCAGCTGTAGCGT |
| | | GCTGCACGAAGCCCTGCACAGCCACTACACCCAGAAAAGCCTGTC |
| | | TCTGAGCCCCGGCAAATGATAA (SEQ ID NO: 1284) |
| | Hinge-CH2 (GAIE)-CH3 | GAACCCAAGAGCTGCGACAAGACCCACACCTGTCCTCCATGTCCT |
| | (LS) (G1m17) | GCTCCAGAACTGCTGGCCGGACCTTCCGTGTTCCTGTTTCC |
| | | TCCAAAGCCTAAGGACACCCTGATGATCAGCAGAACCCCTG |
| | | AAGTGACCTGCGTGGTGGTGGATGTGTCTCACGAGGACCC |
| | | TGAAGTGAAGTTCAATTGGTACGTGGACGGCGTGGAAGTG |
| | | CACAACGCCAAGACCAAGCCTAGAGAGGAACAGTACAACA |
| | | GCACCTACAGAGTGGTGTCCGTGCTGACCGTGCTGCACCA |
| | | GGATTGGCTGAACGGCAAAGAGTACAAGTGCAAGGTGTCC |
| | | AACAAGGCCCTGCCTGCCCCTGAGGAAAAGACCATCAGCA |
| | | AGGCCAAGGGCCAGCCTAGGGAACCCCAGGTTTACACACTGCCT |
| | | CCAAGCCGCGAGGAAATGACCAAGAACCAGGTGTCCCTGACCTGC |
| | | CTCGTGAAGGGCTTCTACCCTTCCGATATCGCCGTGGAATGGGAG |
| | | AGCAATGGCCAGCCTGAGAACAACTACAAGACAACCCCTCCTGTG |
| | | CTGGACAGCGACGGCTCATTCTTCCTGTACAGCAAGCTGACCGTG |
| | | GACAAGTCCAGATGGCAGCAGGGCAACGTGTTCAGCTGTAGCGT |
| | | GCTGCACGAAGCCCTGCACAGCCACTACACCCAGAAAAGCCTGTC |
| | | TCTGAGCCCCGGCAAATGATAA (SEQ ID NO: 1285) |
| | Hinge-CH2-CH3 (G1m17,1) | GAACCCAAGAGCTGCGACAAGACCCACACCTGTCCTCCATGTCCT |
| | | GCTCCAGAACTGCTCGGCGGACCTTCCGTGTTCCTGTTTCC |
| | | TCCAAAGCCTAAGGACACCCTGATGATCAGCAGAACCCCTG |
| | | AAGTGACCTGCGTGGTGGTGGATGTGTCTCACGAGGACCC |
| | | AGAAGTGAAGTTCAATTGGTACGTGGACGGCGTGGAAGTG |
| | | CACAACGCCAAGACCAAGCCTAGAGAGGAACAGTACAACA |
| | | GCACCTACAGAGTGGTGTCCGTGCTGACAGTGCTGCACCA |
| | | GGATTGGCTGAACGGCAAAGAGTACAAGTGCAAGGTGTCC |
| | | AACAAGGCCCTGCCTGCTCCTATCGAGAAAACCATCAGCAA |
| | | GGCCAAGGGCCAGCCTAGGGAACCCCAGGTTTACACACTGCCTC |
| | | CAAGCCGCGACGAACTGACCAAGAACCAGGTGTCCCTGACCTGCC |
| | | TCGTGAAGGGCTTCTACCCTTCCGATATCGCCGTGGAATGGGAGA |
| | | GCAATGGCCAGCCTGAGAACAACTACAAGACAACCCCTCCTGTGC |
| | | TGGACAGCGACGGCTCATTCTTCCTGTACAGCAAGCTGACTGTGG |
| | | ATAAGTCCCGGTGGCAGCAGGGCAACGTGTTCAGCTGTTCTGTGA |
| | | TGCACGAAGCCCTGCACAACCACTACACCCAGAAAAGCCTGTCTC |
| | | TGAGCCCCGGCAAGTGATAA (SEQ ID NO: 1286) |
| | Hinge-CH2-CH3 (LS) | GAACCCAAGAGCTGCGACAAGACCCACACCTGTCCTCCATGTCCT |
| | (G1m17,1) | GCTCCAGAACTGCTCGGCGGACCTTCCGTGTTCCTGTTTCC |
| | | TCCAAAGCCTAAGGACACCCTGATGATCAGCAGAACCCCTG |
| | | AAGTGACCTGCGTGGTGGTGGATGTGTCTCACGAGGACCC |
| | | AGAAGTGAAGTTCAATTGGTACGTGGACGGCGTGGAAGTG |
| | | CACAACGCCAAGACCAAGCCTAGAGAGGAACAGTACAACA |
| | | GCACCTACAGAGTGGTGTCCGTGCTGACAGTGCTGCACCA |
| | | GGATTGGCTGAACGGCAAAGAGTACAAGTGCAAGGTGTCC |
| | | AACAAGGCCCTGCCTGCTCCTATCGAGAAAACCATCAGCAA |
| | | GGCCAAGGGCCAGCCTAGGGAACCCCAGGTTTACACACTGCCTC |
| | | CAAGCCGCGACGAACTGACCAAGAACCAGGTGTCCCTGACCTGCC |
| | | TCGTGAAGGGCTTCTACCCTTCCGATATCGCCGTGGAATGGGAGA |
| | | GCAATGGCCAGCCTGAGAACAACTACAAGACAACCCCTCCTGTGC |
| | | TGGACAGCGACGGCTCATTCTTCCTGTACAGCAAGCTGACCGTGG |
| | | ACAAGTCCAGATGGCAGCAGGGCAACGTGTTCAGCTGTAGCGTGC |
| | | TGCACGAAGCCCTGCACAGCCACTACACCCAGAAAAGCCTGTCTC |
| | | TGAGCCCCGGCAAATGATAA (SEQ ID NO: 1287) |
| | Hinge-CH2 (GAALIE)-CH3 | GAACCCAAGAGCTGCGACAAGACCCACACCTGTCCTCCATGTCCT |
| | (LS) (G1m17,1) | GCTCCAGAACTGCTGGCCGGACCTTCCGTGTTCCTGTTTCC |
| | | TCCAAAGCCTAAGGACACCCTGATGATCAGCAGAACCCCTG |
| | | AAGTGACCTGCGTGGTGGTGGATGTGTCTCACGAGGACCC |
| | | TGAAGTGAAGTTCAATTGGTACGTGGACGGCGTGGAAGTG |
| | | CACAACGCCAAGACCAAGCCTAGAGAGGAACAGTACAACA |
| | | GCACCTACAGAGTGGTGTCCGTGCTGACCGTGCTGCACCA |
| | | GGATTGGCTGAACGGCAAAGAGTACAAGTGCAAGGTGTCC |
| | | AACAAGGCCCTGCCTCTGCCTGAGGAAAAGACCATCAGCA |
| | | AGGCCAAGGGCCAGCCTAGGGAACCCCAGGTTTACACACTGCCT |
| | | CCAAGCCGCGACGAACTGACCAAGAACCAGGTGTCCCTGACCTGC |
| | | CTCGTGAAGGGCTTCTACCCTTCCGATATCGCCGTGGAATGGGAG |
| | | AGCAATGGCCAGCCTGAGAACAACTACAAGACAACCCCTCCTGTG |
| | | CTGGACAGCGACGGCTCATTCTTCCTGTACAGCAAGCTGACCGTG |
| | | GACAAGTCCAGATGGCAGCAGGGCAACGTGTTCAGCTGTAGCGT |
| | | GCTGCACGAAGCCCTGCACAGCCACTACACCCAGAAAAGCCTGTC |
| | | TCTGAGCCCCGGCAAATGATAA (SEQ ID NO: 1288) |
| | Hinge-CH2 (GAIE)-CH3 | GAACCCAAGAGCTGCGACAAGACCCACACCTGTCCTCCATGTCCT |
| | (LS) (G1m17,1) | GCTCCAGAACTGCTGGCCGGACCTTCCGTGTTCCTGTTTCC |
| | | TCCAAAGCCTAAGGACACCCTGATGATCAGCAGAACCCCTG |
| | | AAGTGACCTGCGTGGTGGTGGATGTGTCTCACGAGGACCC |
| | | TGAAGTGAAGTTCAATTGGTACGTGGACGGCGTGGAAGTG |
| | | CACAACGCCAAGACCAAGCCTAGAGAGGAACAGTACAACA |
| | | GCACCTACAGAGTGGTGTCCGTGCTGACCGTGCTGCACCA |
| | | GGATTGGCTGAACGGCAAAGAGTACAAGTGCAAGGTGTCC |
| | | AACAAGGCCCTGCCTGCCCCTGAGGAAAAGACCATCAGCA |
| | | AGGCCAAGGGCCAGCCTAGGGAACCCCAGGTTTACACACTGCCT |
| | | CCAAGCCGCGACGAACTGACCAAGAACCAGGTGTCCCTGACCTGC |
| | | CTCGTGAAGGGCTTCTACCCTTCCGATATCGCCGTGGAATGGGAG |
| | | AGCAATGGCCAGCCTGAGAACAACTACAAGACAACCCCTCCTGTG |
| | | CTGGACAGCGACGGCTCATTCTTCCTGTACAGCAAGCTGACCGTG |
| | | GACAAGTCCAGATGGCAGCAGGGCAACGTGTTCAGCTGTAGCGT |
| | | GCTGCACGAAGCCCTGCACAGCCACTACACCCAGAAAAGCCTGTC |
| | | TCTGAGCCCCGGCAAATGATAA (SEQ ID NO: 1289) |
| | κ-CLcv variant 2 | ATGGATTGGATTTGGAGAATCCTGTTCCTCGTGGGCGCCGCTACC |
| | | GGAGCCCACTCCGAAGTTGTGCTGACACAGAGCCCCGCCATCCTG |
| | | AGTGTTAGCCCTGGCGATAGAGTGATCCTGAGCTGCAGAGCCTCT |
| | | CAGGGCCTCGATTCTTCTCACCTGGCCTGGTACAGATTCAAGCGG |
| | | GGACAGATCCCCACACTGGTCATCTTCGGCACCAGCAACAGAGCC |
| | | AGAGGCACCCCTGATAGATTTTCCGGCTCTGGCAGCGGAGCCGAC |
| | | TTCACCCTGACAATCAGCAGAGTGGAACCCGAGGACTTCGCCACC |
| | | TACTACTGCCAGAGATACGGCGGCACCCCTATCACATTTGGCGGC |
| | | GGAACCACACTGGACAAGAAACGTACGGTGGCCGCTCCTAGCGTG |
| | | TTCATCTTTCCACCTAGCGACAGAAAGCTGAAGTCTGGCACAGCC |
| | | TCTGTCGTGTGCCTGCTCAACAACTTCTACCCCAGAGAAGCCAAG |
| | | GTGCAGTGGAAGGTGGACAACGCCCTGCAGAGCGGCAATAGCCA |
| | | AGAGAGCGTGACCGAGCAGGACAGCAAGGACTCTACCTACAGCCT |
| | | GAGCAGCACACTGACCCTGAGCAAGGCCGACTACGAGAAGCACAA |
| | | AGTGTACGCCTGCGAAGTGACCCACCAGGGCCTTTCTAGCCCTGT |
| | | GACCAAGAGCTTCAACCGGGGCGAGTGCTGATAA (SEQ ID NO: |
| | | 1290) |
| General | Hinge-CH2 (GAIE)-CH3 | GAACCCAAGAGCTGCGACAAGACCCACACCTGTCCTCCATGTCCT |
| | (cah-LS) (G1m3) | GCTCCAGAACTGCTGGCCGGACCTTCCGTGTTCCTGTTTCC |
| | | TCCAAAGCCTAAGGACACCCTGATGATCAGCAGAACCCCTG |
| | | AAGTGACCTGCGTGGTGGTGGATGTGTCTCACGAGGACCC |
| | | TGAAGTGAAGTTCAATTGGTACGTGGACGGCGTGGAAGTG |
| | | CACAACGCCAAGACCAAGCCTAGAGAGGAACAGTACAACA |
| | | GCACCTACAGAGTGGTGTCCGTGCTGACCGTGCTGCACCA |
| | | GGATTGGCTGAACGGCAAAGAGTACAAGTGCAAGGTGTCC |
| | | AACAAGGCCCTGCCTGCCCCTGAGGAAAAGACCATCAGCA |
| | | AGGCCAAGGGCCAGCCTCGCGAACCTCAAGTCTGTACACTGCCT |
| | | CCTAGCCGCGAGGAAATGACCAAGAACCAGGTGTCCCTGAGCTGC |
| | | GCCGTGAAGGGCTTTTACCCTTCCGATATCGCCGTGGAATGGGAG |
| | | AGCAATGGCCAGCCTGAGAACAACTACAAGACAACCCCTCCTGTG |
| | | CTGGACAGCGACGGCTCATTCTTCCTGGTGTCCAAGCTGACAGTG |
| | | GACAAGAGCAGATGGCAGCAGGGCAACGTGTTCAGCTGCAGCGT |
| | | GCTGCATGAAGCCCTGCACAGCCACTACACCCAGAAGTCCCTGTC |
| | | TCTGAGCCCCGGCAAGTGATAA (SEQ ID NO: 1291) |
| | Hinge-CH2 (GAIE)-CH3 | GAACCCAAGAGCTGCGACAAGACCCACACCTGTCCTCCATGTCCT |
| | (cak-LS) (G1m3) | GCTCCAGAACTGCTGGCCGGACCTTCCGTGTTCCTGTTTCC |
| | | TCCAAAGCCTAAGGACACCCTGATGATCAGCAGAACCCCTG |
| | | AAGTGACCTGCGTGGTGGTGGATGTGTCTCACGAGGACCC |
| | | TGAAGTGAAGTTCAATTGGTACGTGGACGGCGTGGAAGTG |
| | | CACAACGCCAAGACCAAGCCTAGAGAGGAACAGTACAACA |
| | | GCACCTACAGAGTGGTGTCCGTGCTGACCGTGCTGCACCA |
| | | GGATTGGCTGAACGGCAAAGAGTACAAGTGCAAGGTGTCC |
| | | AACAAGGCCCTGCCTGCCCCTGAGGAAAAGACCATCAGCA |
| | | AGGCCAAGGGCCAGCCTAGGGAACCCCAGGTTTACACCCTGCCT |
| | | CCATGCCGCGAGGAAATGACCAAGAACCAGGTGTCCCTGTGGTGC |
| | | CTGGTCAAGGGCTTCTACCCTTCCGATATCGCCGTGGAATGGGAG |
| | | AGCAATGGCCAGCCTGAGAACAACTACAAGACAACCCCTCCTGTG |
| | | CTGGACAGCGACGGCTCATTCTTCCTGTACAGCAAGCTGACAGTG |
| | | GACAAGAGCAGATGGCAGCAGGGCAACGTGTTCAGCTGCAGCGT |
| | | GCTGCATGAAGCCCTGCACAGCCACTACACCCAGAAGTCCCTGTC |
| | | TCTGAGCCCCGGCAAGTGATAA (SEQ ID NO: 1292) |
| | Hinge-CH2-CH3 (cah-LS) | GAACCCAAGAGCTGCGACAAGACCCACACCTGTCCTCCATGTCCT |
| | (G1m17) | GCTCCAGAACTGCTCGGCGGACCTTCCGTGTTCCTGTTTCC |
| | | TCCAAAGCCTAAGGACACCCTGATGATCAGCAGAACCCCTG |
| | | AAGTGACCTGCGTGGTGGTGGATGTGTCTCACGAGGACCC |
| | | AGAAGTGAAGTTCAATTGGTACGTGGACGGCGTGGAAGTG |
| | | CACAACGCCAAGACCAAGCCTAGAGAGGAACAGTACAACA |
| | | GCACCTACAGAGTGGTGTCCGTGCTGACAGTGCTGCACCA |
| | | GGATTGGCTGAACGGCAAAGAGTACAAGTGCAAGGTGTCC |
| | | AACAAGGCCCTGCCTGCTCCTATCGAGAAAACCATCAGCAA |
| | | GGCCAAGGGCCAGCCTCGCGAACCTCAAGTCTGTACACTGCCTC |
| | | CTAGCCGCGAGGAAATGACCAAGAACCAGGTGTCCCTGAGCTGCG |
| | | CCGTGAAGGGCTTTTACCCTTCCGATATCGCCGTGGAATGGGAGA |
| | | GCAATGGCCAGCCTGAGAACAACTACAAGACAACCCCTCCTGTGC |
| | | TGGACAGCGACGGCTCATTCTTCCTGGTGTCCAAGCTGACAGTGG |
| | | ACAAGAGCAGATGGCAGCAGGGCAACGTGTTCAGCTGCAGCGTG |
| | | CTGCATGAAGCCCTGCACAGCCACTACACCCAGAAGTCCCTGTCT |
| | | CTGAGCCCCGGCAAGTGATAA (SEQ ID NO: 1293) |
| | Hinge-CH2 (GAALIE)-CH3 | GAACCCAAGAGCTGCGACAAGACCCACACCTGTCCTCCATGTCCT |
| | (cah-LS) (G1m17) | GCTCCAGAACTGCTGGCCGGACCTTCCGTGTTCCTGTTTCC |
| | | TCCAAAGCCTAAGGACACCCTGATGATCAGCAGAACCCCTG |
| | | AAGTGACCTGCGTGGTGGTGGATGTGTCTCACGAGGACCC |
| | | TGAAGTGAAGTTCAATTGGTACGTGGACGGCGTGGAAGTG |
| | | CACAACGCCAAGACCAAGCCTAGAGAGGAACAGTACAACA |
| | | GCACCTACAGAGTGGTGTCCGTGCTGACCGTGCTGCACCA |
| | | GGATTGGCTGAACGGCAAAGAGTACAAGTGCAAGGTGTCC |
| | | AACAAGGCCCTGCCTCTGCCTGAGGAAAAGACCATCAGCA |
| | | AGGCCAAGGGCCAGCCTCGCGAACCTCAAGTCTGTACACTGCCT |
| | | CCTAGCCGCGAGGAAATGACCAAGAACCAGGTGTCCCTGAGCTGC |
| | | GCCGTGAAGGGCTTTTACCCTTCCGATATCGCCGTGGAATGGGAG |
| | | AGCAATGGCCAGCCTGAGAACAACTACAAGACAACCCCTCCTGTG |
| | | CTGGACAGCGACGGCTCATTCTTCCTGGTGTCCAAGCTGACAGTG |
| | | GACAAGAGCAGATGGCAGCAGGGCAACGTGTTCAGCTGCAGCGT |
| | | GCTGCATGAAGCCCTGCACAGCCACTACACCCAGAAGTCCCTGTC |
| | | TCTGAGCCCCGGCAAGTGATAA (SEQ ID NO: 1294) |
| | Hinge-CH2 (GAIE)-CH3 | GAACCCAAGAGCTGCGACAAGACCCACACCTGTCCTCCATGTCCT |
| | (cah-LS) (G1m17) | GCTCCAGAACTGCTGGCCGGACCTTCCGTGTTCCTGTTTCC |
| | | TCCAAAGCCTAAGGACACCCTGATGATCAGCAGAACCCCTG |
| | | AAGTGACCTGCGTGGTGGTGGATGTGTCTCACGAGGACCC |
| | | TGAAGTGAAGTTCAATTGGTACGTGGACGGCGTGGAAGTG |
| | | CACAACGCCAAGACCAAGCCTAGAGAGGAACAGTACAACA |
| | | GCACCTACAGAGTGGTGTCCGTGCTGACCGTGCTGCACCA |
| | | GGATTGGCTGAACGGCAAAGAGTACAAGTGCAAGGTGTCC |
| | | AACAAGGCCCTGCCTGCCCCTGAGGAAAAGACCATCAGCA |
| | | AGGCCAAGGGCCAGCCTCGCGAACCTCAAGTCTGTACACTGCCT |
| | | CCTAGCCGCGAGGAAATGACCAAGAACCAGGTGTCCCTGAGCTGC |
| | | GCCGTGAAGGGCTTTTACCCTTCCGATATCGCCGTGGAATGGGAG |
| | | AGCAATGGCCAGCCTGAGAACAACTACAAGACAACCCCTCCTGTG |
| | | CTGGACAGCGACGGCTCATTCTTCCTGGTGTCCAAGCTGACAGTG |
| | | GACAAGAGCAGATGGCAGCAGGGCAACGTGTTCAGCTGCAGCGT |
| | | GCTGCATGAAGCCCTGCACAGCCACTACACCCAGAAGTCCCTGTC |
| | | TCTGAGCCCCGGCAAGTGATAA (SEQ ID NO: 1295) |
| | Hinge-CH2-CH3 (cak-LS) | GAACCCAAGAGCTGCGACAAGACCCACACCTGTCCTCCATGTCCT |
| | (G1m17) | GCTCCAGAACTGCTCGGCGGACCTTCCGTGTTCCTGTTTCC |
| | | TCCAAAGCCTAAGGACACCCTGATGATCAGCAGAACCCCTG |
| | | AAGTGACCTGCGTGGTGGTGGATGTGTCTCACGAGGACCC |
| | | AGAAGTGAAGTTCAATTGGTACGTGGACGGCGTGGAAGTG |
| | | CACAACGCCAAGACCAAGCCTAGAGAGGAACAGTACAACA |
| | | GCACCTACAGAGTGGTGTCCGTGCTGACAGTGCTGCACCA |
| | | GGATTGGCTGAACGGCAAAGAGTACAAGTGCAAGGTGTCC |
| | | AACAAGGCCCTGCCTGCTCCTATCGAGAAAACCATCAGCAA |
| | | GGCCAAGGGCCAGCCTAGGGAACCCCAGGTTTACACCCTGCCTC |
| | | CATGCCGCGAGGAAATGACCAAGAACCAGGTGTCCCTGTGGTGCC |
| | | TGGTCAAGGGCTTCTACCCTTCCGATATCGCCGTGGAATGGGAGA |
| | | GCAATGGCCAGCCTGAGAACAACTACAAGACAACCCCTCCTGTGC |
| | | TGGACAGCGACGGCTCATTCTTCCTGTACAGCAAGCTGACAGTGG |
| | | ACAAGAGCAGATGGCAGCAGGGCAACGTGTTCAGCTGCAGCGTG |
| | | CTGCATGAAGCCCTGCACAGCCACTACACCCAGAAGTCCCTGTCT |
| | | CTGAGCCCCGGCAAGTGATAA (SEQ ID NO: 1296) |
| | Hinge-CH2 (GAALIE)-CH3 | GAACCCAAGAGCTGCGACAAGACCCACACCTGTCCTCCATGTCCT |
| | (cak-LS) (G1m17) | GCTCCAGAACTGCTGGCCGGACCTTCCGTGTTCCTGTTTCC |
| | | TCCAAAGCCTAAGGACACCCTGATGATCAGCAGAACCCCTG |
| | | AAGTGACCTGCGTGGTGGTGGATGTGTCTCACGAGGACCC |
| | | TGAAGTGAAGTTCAATTGGTACGTGGACGGCGTGGAAGTG |
| | | CACAACGCCAAGACCAAGCCTAGAGAGGAACAGTACAACA |
| | | GCACCTACAGAGTGGTGTCCGTGCTGACCGTGCTGCACCA |
| | | GGATTGGCTGAACGGCAAAGAGTACAAGTGCAAGGTGTCC |
| | | AACAAGGCCCTGCCTCTGCCTGAGGAAAAGACCATCAGCA |
| | | AGGCCAAGGGCCAGCCTAGGGAACCCCAGGTTTACACCCTGCCT |
| | | CCATGCCGCGAGGAAATGACCAAGAACCAGGTGTCCCTGTGGTGC |
| | | CTGGTCAAGGGCTTCTACCCTTCCGATATCGCCGTGGAATGGGAG |
| | | AGCAATGGCCAGCCTGAGAACAACTACAAGACAACCCCTCCTGTG |
| | | CTGGACAGCGACGGCTCATTCTTCCTGTACAGCAAGCTGACAGTG |
| | | GACAAGAGCAGATGGCAGCAGGGCAACGTGTTCAGCTGCAGCGT |
| | | GCTGCATGAAGCCCTGCACAGCCACTACACCCAGAAGTCCCTGTC |
| | | TCTGAGCCCCGGCAAGTGATAA (SEQ ID NO: 1297) |
| | Hinge-CH2 (GAIE)-CH3 | GAACCCAAGAGCTGCGACAAGACCCACACCTGTCCTCCATGTCCT |
| | (cak-LS) (G1m17) | GCTCCAGAACTGCTGGCCGGACCTTCCGTGTTCCTGTTTCC |
| | | TCCAAAGCCTAAGGACACCCTGATGATCAGCAGAACCCCTG |
| | | AAGTGACCTGCGTGGTGGTGGATGTGTCTCACGAGGACCC |
| | | TGAAGTGAAGTTCAATTGGTACGTGGACGGCGTGGAAGTG |
| | | CACAACGCCAAGACCAAGCCTAGAGAGGAACAGTACAACA |
| | | GCACCTACAGAGTGGTGTCCGTGCTGACCGTGCTGCACCA |
| | | GGATTGGCTGAACGGCAAAGAGTACAAGTGCAAGGTGTCC |
| | | AACAAGGCCCTGCCTGCCCCTGAGGAAAAGACCATCAGCA |
| | | AGGCCAAGGGCCAGCCTAGGGAACCCCAGGTTTACACCCTGCCT |
| | | CCATGCCGCGAGGAAATGACCAAGAACCAGGTGTCCCTGTGGTGC |
| | | CTGGTCAAGGGCTTCTACCCTTCCGATATCGCCGTGGAATGGGAG |
| | | AGCAATGGCCAGCCTGAGAACAACTACAAGACAACCCCTCCTGTG |
| | | CTGGACAGCGACGGCTCATTCTTCCTGTACAGCAAGCTGACAGTG |
| | | GACAAGAGCAGATGGCAGCAGGGCAACGTGTTCAGCTGCAGCGT |
| | | GCTGCATGAAGCCCTGCACAGCCACTACACCCAGAAGTCCCTGTC |
| | | TCTGAGCCCCGGCAAGTGATAA (SEQ ID NO: 1298) |
| | Hinge-CH2-CH3 (cah-LS) | GAACCCAAGAGCTGCGACAAGACCCACACCTGTCCTCCATGTCCT |
| | (G1m17,1) | GCTCCAGAACTGCTCGGCGGACCTTCCGTGTTCCTGTTTCC |
| | | TCCAAAGCCTAAGGACACCCTGATGATCAGCAGAACCCCTG |
| | | AAGTGACCTGCGTGGTGGTGGATGTGTCTCACGAGGACCC |
| | | AGAAGTGAAGTTCAATTGGTACGTGGACGGCGTGGAAGTG |
| | | CACAACGCCAAGACCAAGCCTAGAGAGGAACAGTACAACA |
| | | GCACCTACAGAGTGGTGTCCGTGCTGACAGTGCTGCACCA |
| | | GGATTGGCTGAACGGCAAAGAGTACAAGTGCAAGGTGTCC |
| | | AACAAGGCCCTGCCTGCTCCTATCGAGAAAACCATCAGCAA |
| | | GGCCAAGGGCCAGCCTCGCGAACCTCAAGTCTGTACACTGCCTC |
| | | CTAGCCGCGACGAACTGACCAAGAACCAGGTGTCCCTGAGCTGCG |
| | | CCGTGAAGGGCTTTTACCCTTCCGATATCGCCGTGGAATGGGAGA |
| | | GCAATGGCCAGCCTGAGAACAACTACAAGACAACCCCTCCTGTGC |
| | | TGGACAGCGACGGCTCATTCTTCCTGGTGTCCAAGCTGACAGTGG |
| | | ACAAGAGCAGATGGCAGCAGGGCAACGTGTTCAGCTGCAGCGTG |
| | | CTGCATGAAGCCCTGCACAGCCACTACACCCAGAAGTCCCTGTCT |
| | | CTGAGCCCCGGCAAGTGATAA (SEQ ID NO: 1299) |
| | Hinge-CH2 (GAALIE)-CH3 | GAACCCAAGAGCTGCGACAAGACCCACACCTGTCCTCCATGTCCT |
| | (cah-LS) (G1m17,1) | GCTCCAGAACTGCTGGCCGGACCTTCCGTGTTCCTGTTTCC |
| | | TCCAAAGCCTAAGGACACCCTGATGATCAGCAGAACCCCTG |
| | | AAGTGACCTGCGTGGTGGTGGATGTGTCTCACGAGGACCC |
| | | TGAAGTGAAGTTCAATTGGTACGTGGACGGCGTGGAAGTG |
| | | CACAACGCCAAGACCAAGCCTAGAGAGGAACAGTACAACA |
| | | GCACCTACAGAGTGGTGTCCGTGCTGACCGTGCTGCACCA |
| | | GGATTGGCTGAACGGCAAAGAGTACAAGTGCAAGGTGTCC |
| | | AACAAGGCCCTGCCTCTGCCTGAGGAAAAGACCATCAGCA |
| | | AGGCCAAGGGCCAGCCTCGCGAACCTCAAGTCTGTACACTGCCT |
| | | CCTAGCCGCGACGAACTGACCAAGAACCAGGTGTCCCTGAGCTGC |
| | | GCCGTGAAGGGCTTTTACCCTTCCGATATCGCCGTGGAATGGGAG |
| | | AGCAATGGCCAGCCTGAGAACAACTACAAGACAACCCCTCCTGTG |
| | | CTGGACAGCGACGGCTCATTCTTCCTGGTGTCCAAGCTGACAGTG |
| | | GACAAGAGCAGATGGCAGCAGGGCAACGTGTTCAGCTGCAGCGT |
| | | GCTGCATGAAGCCCTGCACAGCCACTACACCCAGAAGTCCCTGTC |
| | | TCTGAGCCCCGGCAAGTGATAA (SEQ ID NO: 1300) |
| | Hinge-CH2 (GAIE)-CH3 | GAACCCAAGAGCTGCGACAAGACCCACACCTGTCCTCCATGTCCT |
| | (cah-LS) (G1m17,1) | GCTCCAGAACTGCTGGCCGGACCTTCCGTGTTCCTGTTTCC |
| | | TCCAAAGCCTAAGGACACCCTGATGATCAGCAGAACCCCTG |
| | | AAGTGACCTGCGTGGTGGTGGATGTGTCTCACGAGGACCC |
| | | TGAAGTGAAGTTCAATTGGTACGTGGACGGCGTGGAAGTG |
| | | CACAACGCCAAGACCAAGCCTAGAGAGGAACAGTACAACA |
| | | GCACCTACAGAGTGGTGTCCGTGCTGACCGTGCTGCACCA |
| | | GGATTGGCTGAACGGCAAAGAGTACAAGTGCAAGGTGTCC |
| | | AACAAGGCCCTGCCTGCCCCTGAGGAAAAGACCATCAGCA |
| | | AGGCCAAGGGCCAGCCTCGCGAACCTCAAGTCTGTACACTGCCT |
| | | CCTAGCCGCGACGAACTGACCAAGAACCAGGTGTCCCTGAGCTGC |
| | | GCCGTGAAGGGCTTTTACCCTTCCGATATCGCCGTGGAATGGGAG |
| | | AGCAATGGCCAGCCTGAGAACAACTACAAGACAACCCCTCCTGTG |
| | | CTGGACAGCGACGGCTCATTCTTCCTGGTGTCCAAGCTGACAGTG |
| | | GACAAGAGCAGATGGCAGCAGGGCAACGTGTTCAGCTGCAGCGT |
| | | GCTGCATGAAGCCCTGCACAGCCACTACACCCAGAAGTCCCTGTC |
| | | TCTGAGCCCCGGCAAGTGATAA (SEQ ID NO: 1301) |
| | Hinge-CH2-CH3 (cak-LS) | GAACCCAAGAGCTGCGACAAGACCCACACCTGTCCTCCATGTCCT |
| | (G1m17,1) | GCTCCAGAACTGCTCGGCGGACCTTCCGTGTTCCTGTTTCC |
| | | TCCAAAGCCTAAGGACACCCTGATGATCAGCAGAACCCCTG |
| | | AAGTGACCTGCGTGGTGGTGGATGTGTCTCACGAGGACCC |
| | | AGAAGTGAAGTTCAATTGGTACGTGGACGGCGTGGAAGTG |
| | | CACAACGCCAAGACCAAGCCTAGAGAGGAACAGTACAACA |
| | | GCACCTACAGAGTGGTGTCCGTGCTGACAGTGCTGCACCA |
| | | GGATTGGCTGAACGGCAAAGAGTACAAGTGCAAGGTGTCC |
| | | AACAAGGCCCTGCCTGCTCCTATCGAGAAAACCATCAGCAA |
| | | GGCCAAGGGCCAGCCTAGGGAACCCCAGGTTTACACCCTGCCTC |
| | | CATGCCGCGACGAACTGACCAAGAACCAGGTGTCCCTGTGGTGCC |
| | | TGGTCAAGGGCTTCTACCCTTCCGATATCGCCGTGGAATGGGAGA |
| | | GCAATGGCCAGCCTGAGAACAACTACAAGACAACCCCTCCTGTGC |
| | | TGGACAGCGACGGCTCATTCTTCCTGTACAGCAAGCTGACAGTGG |
| | | ACAAGAGCAGATGGCAGCAGGGCAACGTGTTCAGCTGCAGCGTG |
| | | CTGCATGAAGCCCTGCACAGCCACTACACCCAGAAGTCCCTGTCT |
| | | CTGAGCCCCGGCAAGTGATAA (SEQ ID NO: 1302) |
| | Hinge-CH2 (GAALIE)-CH3 | GAACCCAAGAGCTGCGACAAGACCCACACCTGTCCTCCATGTCCT |
| | (cak-LS) (G1m17,1) | GCTCCAGAACTGCTGGCCGGACCTTCCGTGTTCCTGTTTCC |
| | | TCCAAAGCCTAAGGACACCCTGATGATCAGCAGAACCCCTG |
| | | AAGTGACCTGCGTGGTGGTGGATGTGTCTCACGAGGACCC |
| | | TGAAGTGAAGTTCAATTGGTACGTGGACGGCGTGGAAGTG |
| | | CACAACGCCAAGACCAAGCCTAGAGAGGAACAGTACAACA |
| | | GCACCTACAGAGTGGTGTCCGTGCTGACCGTGCTGCACCA |
| | | GGATTGGCTGAACGGCAAAGAGTACAAGTGCAAGGTGTCC |
| | | AACAAGGCCCTGCCTCTGCCTGAGGAAAAGACCATCAGCA |
| | | AGGCCAAGGGCCAGCCTAGGGAACCCCAGGTTTACACCCTGCCT |
| | | CCATGCCGCGACGAACTGACCAAGAACCAGGTGTCCCTGTGGTGC |
| | | CTGGTCAAGGGCTTCTACCCTTCCGATATCGCCGTGGAATGGGAG |
| | | AGCAATGGCCAGCCTGAGAACAACTACAAGACAACCCCTCCTGTG |
| | | CTGGACAGCGACGGCTCATTCTTCCTGTACAGCAAGCTGACAGTG |
| | | GACAAGAGCAGATGGCAGCAGGGCAACGTGTTCAGCTGCAGCGT |
| | | GCTGCATGAAGCCCTGCACAGCCACTACACCCAGAAGTCCCTGTC |
| | | TCTGAGCCCCGGCAAGTGATAA (SEQ ID NO: 1303) |
| | Hinge-CH2 (GAIE)-CH3 | GAACCCAAGAGCTGCGACAAGACCCACACCTGTCCTCCATGTCCT |
| | (cak-LS) (G1m17,1) | GCTCCAGAACTGCTGGCCGGACCTTCCGTGTTCCTGTTTCC |
| | | TCCAAAGCCTAAGGACACCCTGATGATCAGCAGAACCCCTG |
| | | AAGTGACCTGCGTGGTGGTGGATGTGTCTCACGAGGACCC |
| | | TGAAGTGAAGTTCAATTGGTACGTGGACGGCGTGGAAGTG |
| | | CACAACGCCAAGACCAAGCCTAGAGAGGAACAGTACAACA |
| | | GCACCTACAGAGTGGTGTCCGTGCTGACCGTGCTGCACCA |
| | | GGATTGGCTGAACGGCAAAGAGTACAAGTGCAAGGTGTCC |
| | | AACAAGGCCCTGCCTGCCCCTGAGGAAAAGACCATCAGCA |
| | | AGGCCAAGGGCCAGCCTAGGGAACCCCAGGTTTACACCCTGCCT |
| | | CCATGCCGCGACGAACTGACCAAGAACCAGGTGTCCCTGTGGTGC |
| | | CTGGTCAAGGGCTTCTACCCTTCCGATATCGCCGTGGAATGGGAG |
| | | AGCAATGGCCAGCCTGAGAACAACTACAAGACAACCCCTCCTGTG |
| | | CTGGACAGCGACGGCTCATTCTTCCTGTACAGCAAGCTGACAGTG |
| | | GACAAGAGCAGATGGCAGCAGGGCAACGTGTTCAGCTGCAGCGT |
| | | GCTGCATGAAGCCCTGCACAGCCACTACACCCAGAAGTCCCTGTC |
| | | TCTGAGCCCCGGCAAGTGATAA (SEQ ID NO: 1304) |

### Example 12: In Vivo Validation of Parental and Mutated PGDM1400 (IgG and scFv-Fc) RibobNAbs

[1433] Generation of polyribonucleotides encoding for PGDM1400 antibody agents as described herein allows the PGDM1400 antibody agents to be delivered in combination with other polyribonucleotides that encode additional anti-HIV antibody agents. Use of the technologies and approaches described herein also allows for simultaneous production of different antibody agents from polyribonucleotides. The formats of antibody agents have been designed to minimize or eliminate the risk of immunoglobulin chain mispairing. Being able to combine multiple antibody agent formulations as described herein (e.g., including a PGDM1400 antibody agent) allows for the development of a composition (e.g., a pharmaceutical composition) that delivers multiple antibody agents together so that they can bind different epitopes of the HIV virus, thereby minimizing viral escape through mutations.

[1434] The present Example shows that polyribonucleotides encoding PGDM1400 antibody agents can induce production of PGDM1400 L/S scFv-Fc. Furthermore, the present Example shows that polyribonucleotides encoding PGDM1400 antibody agents can drive a high antibody titer in the serum of test subjects over a period of time. The example shows a direct comparison of the PK profile of PGDM1400 L/S scFv-Fc with PGDM1400 L/S IgG. A mutation (“L/S”) was introduced in the CH₃ domain of certain antibody agents to improve binding to the FcRn receptor and thereby improve the terminal kinetic and increase the half-life of the antibody agent (see, for example, Zalevsky et al., 2010, Nature biotechnology). In this Example, the pharmacokinetic properties of PGDM1400 (polyribonucleotides as shown in SEQ ID NOs: 1306 and 1312 (HC and LC, respectively)), PGDM1400 L/S IgG (polyribonucleotides as shown in SEQ ID NOs: 1309 and 1312 (HC and LC, respectively)), and PGDM1400 L/S scFv-Fc agents (polyribonucleotides as shown in SEQ ID NO: 1351 (“VL-LL5-VH”)) were evaluated to assess the mutation's effect on such antibody qualities. NSG hFcRn TG32 mice were used, where the murine FcRn receptor has been exchanged to the human version.

[1435] The concentration of the PGDM1400 IgG antibody and the L/S mutated PGDM1400 IgG and scFv-Fc antibody was analyzed in serum of NSG hFcRn Tg32 mice.

[1436] NSG hFcRn TG32 mice were injected intravenously with LNP-encapsulated polyribonucleotides encoding PGDM1400 L/S scFv-Fc (1 Chain), PGDM1400 IgG and PGDM1400 L/S IgG antibody agents (1.5:1 HC/LC) in 150 μL of PBS. Blood was sampled from the mice at various time points, and serum was analyzed for the abundance of the RibobNAbs over a time period of 33 days with Gyros ELISA, as described herein.

### Results

[1437] The results are presented in FIG. 18 in log scale. The 1-18 scFv-Fc and IgG variants were all successfully produced in vivo. Both the 1-18 L/S scFv-Fc and 1-18 L/S IgG antibody agents were expressed in vivo in a dose-dependent manner. The scFv-Fc variant has a lower Cmax compared to the IgG variants (~100 μg/ml vs ~1000 μg/ml). Furthermore, the 1-18 L/S IgG (10 μg Dose) antibody agent displayed improved pharmacokinetics as compared to the 1-18 IgG (10 μg Dose) antibody agent, confirming that the L/S mutation can indeed extend antibody half-life.

### EQUIVALENTS

[1438] Those skilled in the art will recognize, or be able to ascertain using no more than routine experimentation, many equivalents to the specific embodiments of technologies described herein. The scope of the present disclosure is not intended to be limited to the above Description, but rather is as set forth in the following claims.

Lengthy table referenced here
US20260217799A1-20260730-T00001
Please refer to the end of the specification for access instructions.

LENGTHY TABLES
The patent application contains a lengthy table section. A copy of the table is available in electronic form from the USPTO web site (https://seqdata.uspto.gov/docdetail?docId=US20260217799A1). An electronic copy of the table will also be available from the USPTO upon request and payment of the fee set forth in 37 CFR 1.19(b)(3).

The application's sequence listing, which the Patent Office published only in electronic form, follows.

SEQUENCE LISTING (1503 sequences)

SEQ ID NO: 1 - protein, 19 aa, synthetic construct
MDWIWRILFLVGAATGAHS

SEQ ID NO: 2 - RNA, 57 nt, synthetic construct
  source 1..57: mol_type = other RNA
atggattggatttggagaatcctgttcctcgtgggcgccgctaccggagcccactcc

SEQ ID NO: 3 - DNA, 57 bp, synthetic construct
  source 1..57: mol_type = other DNA
atggattggatttggagaatcctgttcctcgtgggcgccgctaccggagcccactcc

SEQ ID NO: 4 - RNA, 57 nt, synthetic construct
  source 1..57: mol_type = other RNA
atggattggatctggcgcatcctgtttctcgtgggagctgccacaggcgcccactct

SEQ ID NO: 5 - DNA, 57 bp, synthetic construct
  source 1..57: mol_type = other DNA
atggattggatctggcgcatcctgtttctcgtgggagctgccacaggcgcccactct

SEQ ID NO: 6 - RNA, 57 nt, synthetic construct
  source 1..57: mol_type = other RNA
atggactggatctggcgcatcctgtttcttgtgggagccgccacaggcgcccattct

SEQ ID NO: 7 - DNA, 57 bp, synthetic construct
  source 1..57: mol_type = other DNA
atggactggatctggcgcatcctgtttcttgtgggagccgccacaggcgcccattct

SEQ ID NO: 8 - RNA, 57 nt, synthetic construct
  source 1..57: mol_type = other RNA
atggattggatctggcgcatcctgtttctcgtgggagctgccacaggcgcccacagc

SEQ ID NO: 9 - DNA, 57 bp, synthetic construct
  source 1..57: mol_type = other DNA
atggattggatctggcgcatcctgtttctcgtgggagctgccacaggcgcccacagc

SEQ ID NO: 10 - RNA, 53 nt, synthetic construct
  source 1..53: mol_type = other RNA
agaataaactagtattcttctggtccccacagactcagagagaacccgccacc

SEQ ID NO: 11 - DNA, 53 bp, synthetic construct
  source 1..53: mol_type = other DNA
agaataaactagtattcttctggtccccacagactcagagagaacccgccacc

SEQ ID NO: 12 - RNA, 298 nt, synthetic construct
  source 1..298: mol_type = other RNA
ggatccgatctggtactgcatgcacgcaatgctagctgcccctttcccgtcctgggtaccccgagtctcccccgacctcgggtcccaggtatgctcccacctccacctgccccactcaccacctctgctagttccagacacctcccaagcacgcagcaatgcagctcaaaacgcttagcctagccacacccccacgggaaacagcagtgattaacctttagcaataaacgaaagtttaactaagctatactaaccccagggttggtcaatttcgtgccagccacaccctcgagctagc

SEQ ID NO: 13 - DNA, 298 bp, synthetic construct
  source 1..298: mol_type = other DNA
ggatccgatctggtactgcatgcacgcaatgctagctgcccctttcccgtcctgggtaccccgagtctcccccgacctcgggtcccaggtatgctcccacctccacctgccccactcaccacctctgctagttccagacacctcccaagcacgcagcaatgcagctcaaaacgcttagcctagccacacccccacgggaaacagcagtgattaacctttagcaataaacgaaagtttaactaagctatactaaccccagggttggtcaatttcgtgccagccacaccctcgagctagc

SEQ ID NO: 14 - RNA, 278 nt, synthetic construct
  source 1..278: mol_type = other RNA
ctggtactgcatgcacgcaatgctagctgcccctttcccgtcctgggtaccccgagtctcccccgacctcgggtcccaggtatgctcccacctccacctgccccactcaccacctctgctagttccagacacctcccaagcacgcagcaatgcagctcaaaacgcttagcctagccacacccccacgggaaacagcagtgattaacctttagcaataaacgaaagtttaactaagctatactaaccccagggttggtcaatttcgtgccagccacacc

SEQ ID NO: 15 - DNA, 278 bp, synthetic construct
  source 1..278: mol_type = other DNA
ctggtactgcatgcacgcaatgctagctgcccctttcccgtcctgggtaccccgagtctcccccgacctcgggtcccaggtatgctcccacctccacctgccccactcaccacctctgctagttccagacacctcccaagcacgcagcaatgcagctcaaaacgcttagcctagccacacccccacgggaaacagcagtgattaacctttagcaataaacgaaagtttaactaagctatactaaccccagggttggtcaatttcgtgccagccacacc

SEQ ID NO: 16 - RNA, 110 nt, synthetic construct
  source 1..110: mol_type = other RNA
aaaaaaaaaaaaaaaaaaaaaaaaaaaaaagcatatgactaaaaaaaaaaaaaaaaaaaaaaaaaaaaaaaaaaaaaaaaaaaaaaaaaaaaaaaaaaaaaaaaaaaaaa

SEQ ID NO: 17 - DNA, 110 bp, synthetic construct
  source 1..110: mol_type = other DNA
aaaaaaaaaaaaaaaaaaaaaaaaaaaaaagcatatgactaaaaaaaaaaaaaaaaaaaaaaaaaaaaaaaaaaaaaaaaaaaaaaaaaaaaaaaaaaaaaaaaaaaaaa

SEQ ID NO: 18 - protein, 8 aa, synthetic construct
GNTLKTYD

SEQ ID NO: 19 - RNA, 24 nt, synthetic construct
  source 1..24: mol_type = other RNA
ggcaacaccctgaagacctacgac

SEQ ID NO: 20 - DNA, 24 bp, synthetic construct
  source 1..24: mol_type = other DNA
ggcaacaccctgaagacctacgac

SEQ ID NO: 21 - protein, 8 aa, synthetic construct
ISHEGDKK

SEQ ID NO: 22 - RNA, 24 nt, synthetic construct
  source 1..24: mol_type = other RNA
atcagccacgagggcgacaagaag

SEQ ID NO: 23 - DNA, 24 bp, synthetic construct
  source 1..24: mol_type = other DNA
atcagccacgagggcgacaagaag

SEQ ID NO: 24 - protein, 36 aa, synthetic construct
CAKGSKHRLRDYALYDDDGALNWAVDVDYLSNLEFW

SEQ ID NO: 25 - RNA, 108 nt, synthetic construct
  source 1..108: mol_type = other RNA
tgtgccaagggcagcaagcaccggctgagagattacgccctgtacgacgatgacggcgccctgaattgggccgtcgatgtggactacctgagcaacctggaattctgg

SEQ ID NO: 26 - DNA, 108 bp, synthetic construct
  source 1..108: mol_type = other DNA
tgtgccaagggcagcaagcaccggctgagagattacgccctgtacgacgatgacggcgccctgaattgggccgtcgatgtggactacctgagcaacctggaattctgg

SEQ ID NO: 27 - protein, 11 aa, synthetic construct
HSLIHGDRNNY

SEQ ID NO: 28 - RNA, 33 nt, synthetic construct
  source 1..33: mol_type = other RNA
cacagcctgatccacggcgacaggaacaactac

SEQ ID NO: 29 - DNA, 33 bp, synthetic construct
  source 1..33: mol_type = other DNA
cacagcctgatccacggcgacaggaacaactac

SEQ ID NO: 30-32 - skipped (3 entries)

SEQ ID NO: 33 - protein, 11 aa, synthetic construct
CMQGRESPWTF

SEQ ID NO: 34 - RNA, 33 nt, synthetic construct
  source 1..33: mol_type = other RNA
tgcatgcagggcagggagagcccctggaccttc

SEQ ID NO: 35 - DNA, 33 bp, synthetic construct
  source 1..33: mol_type = other DNA
tgcatgcagggcagggagagcccctggaccttc

SEQ ID NO: 36 - protein, 141 aa, synthetic construct
QVHLTQSGPEVRKPGTSVKVSCKAPGNTLKTYDLHWVRSVPGQGLQWMGWISHEGDKKVIVERFKAKVTIDWDRSTNTAYLQLSGLTSGDTAVYYCAKGSKHRLRDYALYDDDGALNWAVDVDYLSNLEFWGQGTAVTVSS

SEQ ID NO: 37 - RNA, 423 nt, synthetic construct
  source 1..423: mol_type = other RNA
caggtgcatctgacgcagtctgggcctgaggtgaggaagcctgggacctccgtaaaggtctcctgcaaggcccctggaaacacattgaagacttatgatctacactgggtgcgcagcgtccctggacaaggccttcagtggatgggatggataagccatgagggcgacaagaaggtcattgtggaaagattcaaggccaaagtcaccattgattgggacaggtccaccaatacggcctatctccaactgagcggcctcacatctggcgacacggccgtctattattgtgcgaaaggctcaaaacacaggctgcgagattacgctctctacgacgacgacggcgcattgaattgggctgtcgatgttgactacctttcgaacttggaattctggggccaagggaccgccgtcaccgtctcttca

SEQ ID NO: 38 - DNA, 423 bp, synthetic construct
  source 1..423: mol_type = other DNA
caggtgcatctgacgcagtctgggcctgaggtgaggaagcctgggacctccgtaaaggtctcctgcaaggcccctggaaacacattgaagacttatgatctacactgggtgcgcagcgtccctggacaaggccttcagtggatgggatggataagccatgagggcgacaagaaggtcattgtggaaagattcaaggccaaagtcaccattgattgggacaggtccaccaatacggcctatctccaactgagcggcctcacatctggcgacacggccgtctattattgtgcgaaaggctcaaaacacaggctgcgagattacgctctctacgacgacgacggcgcattgaattgggctgtcgatgttgactacctttcgaacttggaattctggggccaagggaccgccgtcaccgtctcttca

SEQ ID NO: 39 - RNA, 423 nt, synthetic construct
  source 1..423: mol_type = other RNA
caagttcacctgacacagtctggccccgaagtgcggaagcctggcacaagcgtgaaggtgtcctgtaaagcccctggcaacaccctgaaaacctacgacctgcactgggtccgatctgtgcctggacaaggactgcagtggatgggctggattagccacgagggcgacaagaaagtgatcgtggaacggttcaaggccaaagtgaccatcgactgggacagaagcaccaacaccgcctacctgcagctgagcggactgacatctggcgataccgccgtgtactactgtgccaagggcagcaagcaccggctgagagattacgccctgtacgacgatgacggcgccctgaattgggccgtcgatgtggactacctgagcaacctggaattctggggccagggaacagccgtgacagtgtctagt

SEQ ID NO: 40 - DNA, 423 bp, synthetic construct
  source 1..423: mol_type = other DNA
caagttcacctgacacagtctggccccgaagtgcggaagcctggcacaagcgtgaaggtgtcctgtaaagcccctggcaacaccctgaaaacctacgacctgcactgggtccgatctgtgcctggacaaggactgcagtggatgggctggattagccacgagggcgacaagaaagtgatcgtggaacggttcaaggccaaagtgaccatcgactgggacagaagcaccaacaccgcctacctgcagctgagcggactgacatctggcgataccgccgtgtactactgtgccaagggcagcaagcaccggctgagagattacgccctgtacgacgatgacggcgccctgaattgggccgtcgatgtggactacctgagcaacctggaattctggggccagggaacagccgtgacagtgtctagt

SEQ ID NO: 41 - RNA, 423 nt, synthetic construct
  source 1..423: mol_type = other RNA
caagttcatctgacacagagcggccctgaagtgcggaagcctggcacaagcgtgaaggtgtcctgtaaagcccctggcaacaccctgaaaacctacgacctgcactgggtccgatctgtgcctggacaaggactgcagtggatgggctggattagccacgagggcgacaagaaagtgatcgtggaacggttcaaggccaaagtgaccatcgactgggacagaagcaccaacaccgcctacctgcagctgagcggactgacatctggcgataccgccgtgtactactgtgccaagggcagcaagcaccggctgagagattacgccctgtacgacgatgacggcgccctgaattgggccgtcgatgtggactacctgagcaacctggaattctggggccagggaacagccgtgacagtgtctagc

SEQ ID NO: 42 - DNA, 423 bp, synthetic construct
  source 1..423: mol_type = other DNA
caagttcatctgacacagagcggccctgaagtgcggaagcctggcacaagcgtgaaggtgtcctgtaaagcccctggcaacaccctgaaaacctacgacctgcactgggtccgatctgtgcctggacaaggactgcagtggatgggctggattagccacgagggcgacaagaaagtgatcgtggaacggttcaaggccaaagtgaccatcgactgggacagaagcaccaacaccgcctacctgcagctgagcggactgacatctggcgataccgccgtgtactactgtgccaagggcagcaagcaccggctgagagattacgccctgtacgacgatgacggcgccctgaattgggccgtcgatgtggactacctgagcaacctggaattctggggccagggaacagccgtgacagtgtctagc

SEQ ID NO: 43 - protein, 112 aa, synthetic construct
DFVLTQSPHSLSVTPGESASISCKSSHSLIHGDRNNYLAWYVQKPGRSPQLLIYLASSRASGVPDRFSGSGSDKDFTLKISRVETEDVGTYYCMQGRESPWTFGQGTKVDIK

SEQ ID NO: 44 - RNA, 336 nt, synthetic construct
  source 1..336: mol_type = other RNA
gattttgtcctgactcagtctccacactctctgtccgtcacccctggagagtcggcctccatctcctgcaagtctagtcacagcctcattcatggtgataggaacaattatttggcttggtacgtacagaagccagggcggtctccacaactcctgatctatttggcttccagtcgggcctccggggtccctgacaggttcagtggcagtggatcggacaaagattttacactgaagatcagcagagtggagactgaggatgttgggacgtattactgcatgcaaggtcgagaaagtccctggacgttcggccaagggaccaaggtggacatcaaa

SEQ ID NO: 45 - DNA, 336 bp, synthetic construct
  source 1..336: mol_type = other DNA
gattttgtcctgactcagtctccacactctctgtccgtcacccctggagagtcggcctccatctcctgcaagtctagtcacagcctcattcatggtgataggaacaattatttggcttggtacgtacagaagccagggcggtctccacaactcctgatctatttggcttccagtcgggcctccggggtccctgacaggttcagtggcagtggatcggacaaagattttacactgaagatcagcagagtggagactgaggatgttgggacgtattactgcatgcaaggtcgagaaagtccctggacgttcggccaagggaccaaggtggacatcaaa

SEQ ID NO: 46 - RNA, 336 nt, synthetic construct
  source 1..336: mol_type = other RNA
gattttgtgctgacacagtctccccacagcctgagcgttacacctggcgagtctgccagcatcagctgcaagtctagccactctctgatccacggcgaccggaacaactacctggcttggtacgtgcagaagcccggcagatctcctcagctgctgatctacctggccagcagcagagctagcggcgtgccagatagattttctggcagcggcagcgacaaggacttcaccctgaagatctccagagtggaaaccgaggacgtgggcacctactactgtatgcagggcagagagagcccctggacatttggccagggcaccaaggtggacatcaag

SEQ ID NO: 47 - DNA, 336 bp, synthetic construct
  source 1..336: mol_type = other DNA
gattttgtgctgacacagtctccccacagcctgagcgttacacctggcgagtctgccagcatcagctgcaagtctagccactctctgatccacggcgaccggaacaactacctggcttggtacgtgcagaagcccggcagatctcctcagctgctgatctacctggccagcagcagagctagcggcgtgccagatagattttctggcagcggcagcgacaaggacttcaccctgaagatctccagagtggaaaccgaggacgtgggcacctactactgtatgcagggcagagagagcccctggacatttggccagggcaccaaggtggacatcaag

SEQ ID NO: 48 - protein, 20 aa, synthetic construct
GGGGSGGGGSGGGGSGGGGS

SEQ ID NO: 49 - RNA, 60 nt, synthetic construct
  source 1..60: mol_type = other RNA
ggtggcggaggaagcggaggcggaggttcaggcggcggaggctctggcggtggtggatct

SEQ ID NO: 50 - DNA, 60 bp, synthetic construct
  source 1..60: mol_type = other DNA
ggtggcggaggaagcggaggcggaggttcaggcggcggaggctctggcggtggtggatct

SEQ ID NO: 51 - RNA, 60 nt, synthetic construct
  source 1..60: mol_type = other RNA
ggtggcggtggttctggcggaggcggaagtggcggcggtgggtccggaggtggtggatct

SEQ ID NO: 52 - DNA, 60 bp, synthetic construct
  source 1..60: mol_type = other DNA
ggtggcggtggttctggcggaggcggaagtggcggcggtgggtccggaggtggtggatct

SEQ ID NO: 53 - RNA, 60 nt, synthetic construct
  source 1..60: mol_type = other RNA
ggcggaggtggaagtggtggcggcggatctggcggcggtgggtccggaggtggtggatct

SEQ ID NO: 54 - DNA, 60 bp, synthetic construct
  source 1..60: mol_type = other DNA
ggcggaggtggaagtggtggcggcggatctggcggcggtgggtccggaggtggtggatct

SEQ ID NO: 55 - RNA, 60 nt, synthetic construct
  source 1..60: mol_type = other RNA
ggcggaggtggaagtggtggtggcggtagcggaggcggtgggtccggaggtggtggatct

SEQ ID NO: 56 - DNA, 60 bp, synthetic construct
  source 1..60: mol_type = other DNA
ggcggaggtggaagtggtggtggcggtagcggaggcggtgggtccggaggtggtggatct

SEQ ID NO: 57 - RNA, 60 nt, synthetic construct
  source 1..60: mol_type = other RNA
ggcggcggaggaagcggaggcggaggttctggtggcggaggctcaggcggtggcggatct

SEQ ID NO: 58 - DNA, 60 bp, synthetic construct
  source 1..60: mol_type = other DNA
ggcggcggaggaagcggaggcggaggttctggtggcggaggctcaggcggtggcggatct

SEQ ID NO: 59 - protein, 25 aa, synthetic construct
GGGGSGGGGSGGGGSGGGGSGGGGS

SEQ ID NO: 60 - RNA, 75 nt, synthetic construct
  source 1..75: mol_type = other RNA
ggcggcggaggaagcggaggcggaggttctggtggtggtggctctggtggcggaggctcaggcggtggcggatct

SEQ ID NO: 61 - DNA, 75 bp, synthetic construct
  source 1..75: mol_type = other DNA
ggcggcggaggaagcggaggcggaggttctggtggtggtggctctggtggcggaggctcaggcggtggcggatct

SEQ ID NO: 62 - RNA, 75 nt, synthetic construct
  source 1..75: mol_type = other RNA
ggcggcggaggaagcggagggggaggctctggaggtggtggctctggtggcggaggctcaggcggtggcggatct

SEQ ID NO: 63 - DNA, 75 bp, synthetic construct
  source 1..75: mol_type = other DNA
ggcggcggaggaagcggagggggaggctctggaggtggtggctctggtggcggaggctcaggcggtggcggatct

SEQ ID NO: 64 - protein, 293 aa, synthetic construct
QVHLTQSGPEVRKPGTSVKVSCKAPGNTLKTYDLHWVRSVPGQGLQWMGWISHEGDKKVIVERFKAKVTIDWDRSTNTAYLQLSGLTSGDTAVYYCAKGSKHRLRDYALYDDDGALNWAVDVDYLSNLEFWGQGTAVTVSSGGGGSGGGGSGGGGSGGGGSDFVLTQSPHSLSVTPGESASISCKSSHSLIHGDRNNYLAWYVQKPGRSPQLLIYLASSRASGVPDRFSGSGSDKDFTLKISRVETEDVGTYYCMQGRESPWTFGQGTKVDIKGGGGSGGGGSGGGGSGGGGS

SEQ ID NO: 65 - RNA, 879 nt, synthetic construct
  source 1..879: mol_type = other RNA
caagttcacctgacacagtctggccccgaagtgcggaagcctggcacaagcgtgaaggtgtcctgtaaagcccctggcaacaccctgaaaacctacgacctgcactgggtccgatctgtgcctggacaaggactgcagtggatgggctggattagccacgagggcgacaagaaagtgatcgtggaacggttcaaggccaaagtgaccatcgactgggacagaagcaccaacaccgcctacctgcagctgagcggactgacatctggcgataccgccgtgtactactgtgccaagggcagcaagcaccggctgagagattacgccctgtacgacgatgacggcgccctgaattgggccgtcgatgtggactacctgagcaacctggaattctggggccagggaacagccgtgacagtgtcttccggtggcggaggaagcggaggcggaggttcaggcggcggaggctctggcggtggtggatctgattttgtgctgacacagagccctcacagcctgagcgttacacctggcgagagcgccagcatcagctgcaagtctagccactctctgatccacggcgaccggaacaactacctggcttggtacgtgcagaagcccggcagatctcctcagctgctgatctacctggccagcagcagagctagcggcgtgccagatagattttctggcagcggcagcgacaaggatttcaccctgaagatctccagagtggaaaccgaggacgtgggcacctactactgtatgcagggcagagagagcccctggacatttggccagggcaccaaggtggacatcaaaggtggcggtggttctggcggaggcggaagtggcggcggtgggtccggaggtggtggatct

SEQ ID NO: 66 - DNA, 879 bp, synthetic construct
  source 1..879: mol_type = other DNA
caagttcacctgacacagtctggccccgaagtgcggaagcctggcacaagcgtgaaggtgtcctgtaaagcccctggcaacaccctgaaaacctacgacctgcactgggtccgatctgtgcctggacaaggactgcagtggatgggctggattagccacgagggcgacaagaaagtgatcgtggaacggttcaaggccaaagtgaccatcgactgggacagaagcaccaacaccgcctacctgcagctgagcggactgacatctggcgataccgccgtgtactactgtgccaagggcagcaagcaccggctgagagattacgccctgtacgacgatgacggcgccctgaattgggccgtcgatgtggactacctgagcaacctggaattctggggccagggaacagccgtgacagtgtcttccggtggcggaggaagcggaggcggaggttcaggcggcggaggctctggcggtggtggatctgattttgtgctgacacagagccctcacagcctgagcgttacacctggcgagagcgccagcatcagctgcaagtctagccactctctgatccacggcgaccggaacaactacctggcttggtacgtgcagaagcccggcagatctcctcagctgctgatctacctggccagcagcagagctagcggcgtgccagatagattttctggcagcggcagcgacaaggatttcaccctgaagatctccagagtggaaaccgaggacgtgggcacctactactgtatgcagggcagagagagcccctggacatttggccagggcaccaaggtggacatcaaaggtggcggtggttctggcggaggcggaagtggcggcggtgggtccggaggtggtggatct

SEQ ID NO: 67 - protein, 293 aa, synthetic construct
DFVLTQSPHSLSVTPGESASISCKSSHSLIHGDRNNYLAWYVQKPGRSPQLLIYLASSRASGVPDRFSGSGSDKDFTLKISRVETEDVGTYYCMQGRESPWTFGQGTKVDIKGGGGSGGGGSGGGGSGGGGSQVHLTQSGPEVRKPGTSVKVSCKAPGNTLKTYDLHWVRSVPGQGLQWMGWISHEGDKKVIVERFKAKVTIDWDRSTNTAYLQLSGLTSGDTAVYYCAKGSKHRLRDYALYDDDGALNWAVDVDYLSNLEFWGQGTAVTVSSGGGGSGGGGSGGGGSGGGGS

SEQ ID NO: 68 - RNA, 879 nt, synthetic construct
  source 1..879: mol_type = other RNA
gattttgtgctgacacagtctccccacagcctgagcgttacacctggcgagtctgccagcatcagctgcaagtctagccactctctgatccacggcgaccggaacaactacctggcttggtacgtgcagaagcccggcagatctcctcagctgctgatctacctggccagcagcagagcttctggcgtgcccgatagattttctggcagcggcagcgacaaggacttcaccctgaagatctccagagtggaaaccgaggacgtgggcacctactactgtatgcagggcagagagagcccctggacatttggccagggcaccaaggtggacatcaaaggcggcggaggaagcggaggcggaggttctggtggcggaggctcaggcggtggcggatctcaagttcatctgacacagagcggccctgaagtgcggaagcctggcacaagcgtgaaggtgtcctgtaaagcccctggcaacaccctgaaaacctacgacctgcactgggtccgatctgtgcctggacagggactgcaatggatgggctggattagccacgagggcgacaagaaagtgatcgtggaacggttcaaggccaaagtgaccatcgactgggacagaagcaccaacaccgcctacctgcagctgagcggactgacatctggcgataccgccgtgtactactgtgccaagggcagcaagcaccggctgagagattacgccctgtacgacgatgacggcgccctgaattgggccgtcgatgtggactacctgagcaacctggaattctggggccagggaacagccgtgacagtgtcttccggcggaggtggaagtggtggtggcggtagcggaggcggtgggtccggaggtggtggatct

SEQ ID NO: 69 - DNA, 879 bp, synthetic construct
  source 1..879: mol_type = other DNA
gattttgtgctgacacagtctccccacagcctgagcgttacacctggcgagtctgccagcatcagctgcaagtctagccactctctgatccacggcgaccggaacaactacctggcttggtacgtgcagaagcccggcagatctcctcagctgctgatctacctggccagcagcagagcttctggcgtgcccgatagattttctggcagcggcagcgacaaggacttcaccctgaagatctccagagtggaaaccgaggacgtgggcacctactactgtatgcagggcagagagagcccctggacatttggccagggcaccaaggtggacatcaaaggcggcggaggaagcggaggcggaggttctggtggcggaggctcaggcggtggcggatctcaagttcatctgacacagagcggccctgaagtgcggaagcctggcacaagcgtgaaggtgtcctgtaaagcccctggcaacaccctgaaaacctacgacctgcactgggtccgatctgtgcctggacagggactgcaatggatgggctggattagccacgagggcgacaagaaagtgatcgtggaacggttcaaggccaaagtgaccatcgactgggacagaagcaccaacaccgcctacctgcagctgagcggactgacatctggcgataccgccgtgtactactgtgccaagggcagcaagcaccggctgagagattacgccctgtacgacgatgacggcgccctgaattgggccgtcgatgtggactacctgagcaacctggaattctggggccagggaacagccgtgacagtgtcttccggcggaggtggaagtggtggtggcggtagcggaggcggtgggtccggaggtggtggatct

SEQ ID NO: 70 - protein, 298 aa, synthetic construct
QVHLTQSGPEVRKPGTSVKVSCKAPGNTLKTYDLHWVRSVPGQGLQWMGWISHEGDKKVIVERFKAKVTIDWDRSTNTAYLQLSGLTSGDTAVYYCAKGSKHRLRDYALYDDDGALNWAVDVDYLSNLEFWGQGTAVTVSSGGGGSGGGGSGGGGSGGGGSGGGGSDFVLTQSPHSLSVTPGESASISCKSSHSLIHGDRNNYLAWYVQKPGRSPQLLIYLASSRASGVPDRFSGSGSDKDFTLKISRVETEDVGTYYCMQGRESPWTFGQGTKVDIKGGGGSGGGGSGGGGSGGGGS

SEQ ID NO: 71 - RNA, 894 nt, synthetic construct
  source 1..894: mol_type = other RNA
caagttcacctgacacagtctggccccgaagtgcggaagcctggcacaagcgtgaaggtgtcctgtaaagcccctggcaacaccctgaaaacctacgacctgcactgggtccgatctgtgcctggacaaggactgcagtggatgggctggattagccacgagggcgacaagaaagtgatcgtggaacggttcaaggccaaagtgaccatcgactgggacagaagcaccaacaccgcctacctgcagctgagcggactgacatctggcgataccgccgtgtactactgtgccaagggcagcaagcaccggctgagagattacgccctgtacgacgatgacggcgccctgaattgggccgtcgatgtggactacctgagcaacctggaattctggggccagggaacagccgtgacagtgtcttccggcggcggaggaagcggagggggaggctctggaggtggtggctctggtggcggaggctcaggcggtggcggatctgattttgtgctgacacagagccctcacagcctgagcgttacacctggcgagagcgccagcatcagctgcaagtctagccactctctgatccacggcgaccggaacaactacctggcttggtacgtgcagaagcccggcagatctcctcagctgctgatctacctggccagcagcagagctagcggcgtgccagatagattttctggcagcggcagcgacaaggatttcaccctgaagatctccagagtggaaaccgaggacgtgggcacctactactgtatgcagggcagagagagcccctggacatttggccagggcaccaaggtggacatcaaaggcggaggtggaagtggtggtggcggtagcggaggcggtgggtccggaggtggtggatct

SEQ ID NO: 72 - DNA, 894 bp, synthetic construct
  source 1..894: mol_type = other DNA
caagttcacctgacacagtctggccccgaagtgcggaagcctggcacaagcgtgaaggtgtcctgtaaagcccctggcaacaccctgaaaacctacgacctgcactgggtccgatctgtgcctggacaaggactgcagtggatgggctggattagccacgagggcgacaagaaagtgatcgtggaacggttcaaggccaaagtgaccatcgactgggacagaagcaccaacaccgcctacctgcagctgagcggactgacatctggcgataccgccgtgtactactgtgccaagggcagcaagcaccggctgagagattacgccctgtacgacgatgacggcgccctgaattgggccgtcgatgtggactacctgagcaacctggaattctggggccagggaacagccgtgacagtgtcttccggcggcggaggaagcggagggggaggctctggaggtggtggctctggtggcggaggctcaggcggtggcggatctgattttgtgctgacacagagccctcacagcctgagcgttacacctggcgagagcgccagcatcagctgcaagtctagccactctctgatccacggcgaccggaacaactacctggcttggtacgtgcagaagcccggcagatctcctcagctgctgatctacctggccagcagcagagctagcggcgtgccagatagattttctggcagcggcagcgacaaggatttcaccctgaagatctccagagtggaaaccgaggacgtgggcacctactactgtatgcagggcagagagagcccctggacatttggccagggcaccaaggtggacatcaaaggcggaggtggaagtggtggtggcggtagcggaggcggtgggtccggaggtggtggatct

SEQ ID NO: 73 - protein, 298 aa, synthetic construct
DFVLTQSPHSLSVTPGESASISCKSSHSLIHGDRNNYLAWYVQKPGRSPQLLIYLASSRASGVPDRFSGSGSDKDFTLKISRVETEDVGTYYCMQGRESPWTFGQGTKVDIKGGGGSGGGGSGGGGSGGGGSGGGGSQVHLTQSGPEVRKPGTSVKVSCKAPGNTLKTYDLHWVRSVPGQGLQWMGWISHEGDKKVIVERFKAKVTIDWDRSTNTAYLQLSGLTSGDTAVYYCAKGSKHRLRDYALYDDDGALNWAVDVDYLSNLEFWGQGTAVTVSSGGGGSGGGGSGGGGSGGGGS

SEQ ID NO: 74 - RNA, 894 nt, synthetic construct
  source 1..894: mol_type = other RNA
gattttgtgctgacacagtctccccacagcctgagcgttacacctggcgagtctgccagcatcagctgcaagtctagccactctctgatccacggcgaccggaacaactacctggcttggtacgtgcagaagcccggcagatctcctcagctgctgatctacctggccagcagcagagcttctggcgtgcccgatagattttctggcagcggcagcgacaaggacttcaccctgaagatctccagagtggaaaccgaggacgtgggcacctactactgtatgcagggcagagagagcccctggacatttggccagggcaccaaggtggacatcaaaggcggcggaggaagcggaggcggaggttctggtggtggtggctctggtggcggaggctcaggcggtggcggatctcaagttcatctgacacagagcggccctgaagtgcggaagcctggcacaagcgtgaaggtgtcctgtaaagcccctggcaacaccctgaaaacctacgacctgcactgggtccgatctgtgcctggacagggactgcaatggatgggctggattagccacgagggcgacaagaaagtgatcgtggaacggttcaaggccaaagtgaccatcgactgggacagaagcaccaacaccgcctacctgcagctgagcggactgacatctggcgataccgccgtgtactactgtgccaagggcagcaagcaccggctgagagattacgccctgtacgacgatgacggcgccctgaattgggccgtcgatgtggactacctgagcaacctggaattctggggccagggaacagccgtgacagtgtcttccggcggaggtggaagtggtggcggcggatctggcggcggtgggtccggaggtggtggatct

SEQ ID NO: 75 - DNA, 894 bp, synthetic construct
  source 1..894: mol_type = other DNA
gattttgtgctgacacagtctccccacagcctgagcgttacacctggcgagtctgccagcatcagctgcaagtctagccactctctgatccacggcgaccggaacaactacctggcttggtacgtgcagaagcccggcagatctcctcagctgctgatctacctggccagcagcagagcttctggcgtgcccgatagattttctggcagcggcagcgacaaggacttcaccctgaagatctccagagtggaaaccgaggacgtgggcacctactactgtatgcagggcagagagagcccctggacatttggccagggcaccaaggtggacatcaaaggcggcggaggaagcggaggcggaggttctggtggtggtggctctggtggcggaggctcaggcggtggcggatctcaagttcatctgacacagagcggccctgaagtgcggaagcctggcacaagcgtgaaggtgtcctgtaaagcccctggcaacaccctgaaaacctacgacctgcactgggtccgatctgtgcctggacagggactgcaatggatgggctggattagccacgagggcgacaagaaagtgatcgtggaacggttcaaggccaaagtgaccatcgactgggacagaagcaccaacaccgcctacctgcagctgagcggactgacatctggcgataccgccgtgtactactgtgccaagggcagcaagcaccggctgagagattacgccctgtacgacgatgacggcgccctgaattgggccgtcgatgtggactacctgagcaacctggaattctggggccagggaacagccgtgacagtgtcttccggcggaggtggaagtggtggcggcggatctggcggcggtgggtccggaggtggtggatct

SEQ ID NO: 76 - protein, 98 aa, synthetic construct
ASTKGPSVFPLAPSSKSTSGGTAALGCLVKDYFPEPVTVSWNSGALTSGVHTFPAVLQSSGLYSLSSVVTVPSSSLGTQTYICNVNHKPSNTKVDKRV

SEQ ID NO: 77 - RNA, 294 nt, synthetic construct
  source 1..294: mol_type = other RNA
gcctctacaaagggccctagcgtgttccctctggctcctagcagcaagtcgacatctggcggaacagccgctctgggctgtctggtcaaggactactttcccgagcctgtgacagtgtcctggaactctggcgctctgacaagcggcgtgcacacatttccagccgtgctgcaaagcagcggcctgtactctctgagcagcgtggtcacagtgccaagctctagcctgggcacccagacctacatctgcaatgtgaaccacaagcctagcaacaccaaggtggacaagagagtg

SEQ ID NO: 78 - DNA, 294 bp, synthetic construct
  source 1..294: mol_type = other DNA
gcctctacaaagggccctagcgtgttccctctggctcctagcagcaagtcgacatctggcggaacagccgctctgggctgtctggtcaaggactactttcccgagcctgtgacagtgtcctggaactctggcgctctgacaagcggcgtgcacacatttccagccgtgctgcaaagcagcggcctgtactctctgagcagcgtggtcacagtgccaagctctagcctgggcacccagacctacatctgcaatgtgaaccacaagcctagcaacaccaaggtggacaagagagtg

SEQ ID NO: 79 - RNA, 294 nt, synthetic construct
  source 1..294: mol_type = other RNA
gcctctacaaagggccctagcgtgttccctctggctcctagcagcaagtcgacatctggcggaacagccgctctgggctgtctggtcaaggactactttcccgagcctgtgacagtgtcctggaactctggcgctctgacaagcggcgtgcacacatttccagccgtgctgcaaagcagcggcctgtactctctgagcagcgtggtcacagtgccaagctctagcctgggcacccagacctacatctgcaatgtgaaccacaagcctagcaacaccaaggtggacaagcgcgtg

SEQ ID NO: 80 - DNA, 294 bp, synthetic construct
  source 1..294: mol_type = other DNA
gcctctacaaagggccctagcgtgttccctctggctcctagcagcaagtcgacatctggcggaacagccgctctgggctgtctggtcaaggactactttcccgagcctgtgacagtgtcctggaactctggcgctctgacaagcggcgtgcacacatttccagccgtgctgcaaagcagcggcctgtactctctgagcagcgtggtcacagtgccaagctctagcctgggcacccagacctacatctgcaatgtgaaccacaagcctagcaacaccaaggtggacaagcgcgtg

SEQ ID NO: 81 - protein, 98 aa, synthetic construct
ASTKGPSVFPLAPSSKSTSGGTAALGCLVKDYFPEPVTVSWNSGALTSGVHTFPAVLQSSGLYSLSSVVTVPSSSLGTQTYICNVNHKPSNTKVDKKV

SEQ ID NO: 82 - RNA, 294 nt, synthetic construct
  source 1..294: mol_type = other RNA
gcctctacaaagggccctagcgtgttccctctggctcctagcagcaagtcgacatctggcggaacagccgctctgggctgtctggtcaaggactactttcccgagcctgtgacagtgtcctggaactctggcgctctgacaagcggcgtgcacacatttccagccgtgctgcaaagcagcggcctgtactctctgagcagcgtggtcacagtgccaagctctagcctgggcacccagacctacatctgcaatgtgaaccacaagcctagcaacaccaaggtggacaagaaggtg

SEQ ID NO: 83 - DNA, 294 bp, synthetic construct
  source 1..294: mol_type = other DNA
gcctctacaaagggccctagcgtgttccctctggctcctagcagcaagtcgacatctggcggaacagccgctctgggctgtctggtcaaggactactttcccgagcctgtgacagtgtcctggaactctggcgctctgacaagcggcgtgcacacatttccagccgtgctgcaaagcagcggcctgtactctctgagcagcgtggtcacagtgccaagctctagcctgggcacccagacctacatctgcaatgtgaaccacaagcctagcaacaccaaggtggacaagaaggtg

SEQ ID NO: 84 - protein, 98 aa, synthetic construct
ASTKGPSVFPLAPSSKSTSGGTAALGCLVEDYFPEPVTVSWNSGALTSGVHTFPAVLQSSGLYSLSSVVTVPSSSLGTQTYICNVNHKPSNTKVDDRV

SEQ ID NO: 85 - RNA, 294 nt, synthetic construct
  source 1..294: mol_type = other RNA
gcttccacaaagggccctagcgtgttccctctggctcctagcagcaagtctacaagcggaggaacagctgccctgggctgcctggtggaagattactttcctgagcctgtgaccgtgtcctggaacagcggtgctctgacttctggcgtgcacacctttccagccgtgctgcaaagcagcggcctgtactctctgagcagcgtggtcacagtgccaagctctagcctgggcacccagacctacatctgcaatgtgaaccacaagcctagcaacaccaaggtggacgacagagtg

SEQ ID NO: 86 - DNA, 294 bp, synthetic construct
  source 1..294: mol_type = other DNA
gcttccacaaagggccctagcgtgttccctctggctcctagcagcaagtctacaagcggaggaacagctgccctgggctgcctggtggaagattactttcctgagcctgtgaccgtgtcctggaacagcggtgctctgacttctggcgtgcacacctttccagccgtgctgcaaagcagcggcctgtactctctgagcagcgtggtcacagtgccaagctctagcctgggcacccagacctacatctgcaatgtgaaccacaagcctagcaacaccaaggtggacgacagagtg

SEQ ID NO: 87 - protein, 98 aa, synthetic construct
ASTKGPSVFPLAPSSKSTSGGTAALGCLVEDYFPEPVTVSWNSGALTSGVHTFPAVLQSSGLYSLSSVVTVPSSSLGTQTYICNVNHKPSNTKVDDKV

SEQ ID NO: 88 - RNA, 294 nt, synthetic construct
  source 1..294: mol_type = other RNA
gcttccacaaagggccctagcgtgttccctctggctcctagcagcaagtctacaagcggaggaacagctgccctgggctgcctggtggaagattactttcctgagcctgtgaccgtgtcctggaacagcggtgctctgacttctggcgtgcacacctttccagccgtgctgcaaagcagcggcctgtactctctgagcagcgtggtcacagtgccaagctctagcctgggcacccagacctacatctgcaatgtgaaccacaagcctagcaacaccaaggtggacgacaaggtg

SEQ ID NO: 89 - DNA, 294 bp, synthetic construct
  source 1..294: mol_type = other DNA
gcttccacaaagggccctagcgtgttccctctggctcctagcagcaagtctacaagcggaggaacagctgccctgggctgcctggtggaagattactttcctgagcctgtgaccgtgtcctggaacagcggtgctctgacttctggcgtgcacacctttccagccgtgctgcaaagcagcggcctgtactctctgagcagcgtggtcacagtgccaagctctagcctgggcacccagacctacatctgcaatgtgaaccacaagcctagcaacaccaaggtggacgacaaggtg

SEQ ID NO: 90 - protein, 105 aa, synthetic construct
SSASTKGPSVFPLAPSSKSTSGGTAALGCLVKDYFPEPVTVSWNSGALTSGVHTFPAVLQSSGLYSLSSVVTVPSSSLGTQTYICNVNHKPSNTKVDKRVEPKSC

SEQ ID NO: 91 - RNA, 321 nt, synthetic construct
  source 1..321: mol_type = other RNA
agcagcgcctctacaaagggccccagcgttttcccactggctcctagcagcaagagcacatctggcggaacagccgctctgggctgtctggtcaaggactactttcccgagcctgtgaccgtgtcctggaattctggcgctctgacatccggcgtgcacacctttccagctgtgctgcaaagcagcggcctgtactctctgagcagcgtggtcacagtgccaagctctagcctgggcacccagacctacatctgcaatgtgaaccacaagcctagcaacacgaaggtcgacaagagagtggaacccaagtcctgctgataa

SEQ ID NO: 92 - DNA, 321 bp, synthetic construct
  source 1..321: mol_type = other DNA
agcagcgcctctacaaagggccccagcgttttcccactggctcctagcagcaagagcacatctggcggaacagccgctctgggctgtctggtcaaggactactttcccgagcctgtgaccgtgtcctggaattctggcgctctgacatccggcgtgcacacctttccagctgtgctgcaaagcagcggcctgtactctctgagcagcgtggtcacagtgccaagctctagcctgggcacccagacctacatctgcaatgtgaaccacaagcctagcaacacgaaggtcgacaagagagtggaacccaagtcctgctgataa

SEQ ID NO: 93 - protein, 105 aa, synthetic construct
SSASTKGPSVFPLAPSSKSTSGGTAALGCLVKDYFPEPVTVSWNSGALTSGVHTFPAVLQSSGLYSLSSVVTVPSSSLGTQTYICNVNHKPSNTKVDKKVEPKSC

SEQ ID NO: 94 - RNA, 321 nt, synthetic construct
  source 1..321: mol_type = other RNA
agcagcgcctctacaaagggccccagcgttttcccactggctcctagcagcaagagcacatctggcggaacagccgctctgggctgtctggtcaaggactactttcccgagcctgtgaccgtgtcctggaattctggcgctctgacatccggcgtgcacacctttccagctgtgctgcaaagcagcggcctgtactctctgagcagcgtggtcacagtgccaagctctagcctgggcacccagacctacatctgcaatgtgaaccacaagcctagcaacacgaaggtcgacaagaaggtggaacccaagtcctgctgataa

SEQ ID NO: 95 - DNA, 321 bp, synthetic construct
  source 1..321: mol_type = other DNA
agcagcgcctctacaaagggccccagcgttttcccactggctcctagcagcaagagcacatctggcggaacagccgctctgggctgtctggtcaaggactactttcccgagcctgtgaccgtgtcctggaattctggcgctctgacatccggcgtgcacacctttccagctgtgctgcaaagcagcggcctgtactctctgagcagcgtggtcacagtgccaagctctagcctgggcacccagacctacatctgcaatgtgaaccacaagcctagcaacacgaaggtcgacaagaaggtggaacccaagtcctgctgataa

SEQ ID NO: 96 - protein, 110 aa, synthetic construct
APELLGGPSVFLFPPKPKDTLMISRTPEVTCVVVDVSHEDPEVKFNWYVDGVEVHNAKTKPREEQYNSTYRVVSVLTVLHQDWLNGKEYKCKVSNKALPAPIEKTISKAK

SEQ ID NO: 97 - RNA, 330 nt, synthetic construct
  source 1..330: mol_type = other RNA
gctccagaactgctcggcggaccttccgtgttcctgtttcctccaaagcctaaggacaccctgatgatcagcagaacccctgaagtgacctgcgtggtggtggatgtgtctcacgaggaccccgaagtgaagttcaattggtacgtggacggcgtggaagtgcacaacgccaagaccaagcctagagaggaacagtacaacagcacctacagagtggtgtccgtgctgacagtgctgcaccaggattggctgaacggcaaagagtacaagtgcaaggtgtccaacaaggccctgcctgctcctatcgagaaaaccatcagcaaggccaag

SEQ ID NO: 98 - DNA, 330 bp, synthetic construct
  source 1..330: mol_type = other DNA
gctccagaactgctcggcggaccttccgtgttcctgtttcctccaaagcctaaggacaccctgatgatcagcagaacccctgaagtgacctgcgtggtggtggatgtgtctcacgaggaccccgaagtgaagttcaattggtacgtggacggcgtggaagtgcacaacgccaagaccaagcctagagaggaacagtacaacagcacctacagagtggtgtccgtgctgacagtgctgcaccaggattggctgaacggcaaagagtacaagtgcaaggtgtccaacaaggccctgcctgctcctatcgagaaaaccatcagcaaggccaag

SEQ ID NO: 99 - protein, 110 aa, synthetic construct
APELLAGPSVFLFPPKPKDTLMISRTPEVTCVVVDVSHEDPEVKFNWYVDGVEVHNAKTKPREEQYNSTYRVVSVLTVLHQDWLNGKEYKCKVSNKALPLPEEKTISKAK

SEQ ID NO: 100 - RNA, 330 nt, synthetic construct
  source 1..330: mol_type = other RNA
gctccagaactgctggccggaccttccgtgttcctgtttcctccaaagcctaaggacaccctgatgatcagcagaacccctgaagtgacctgcgtggtggtggatgtgtctcacgaggaccccgaagtgaagttcaattggtacgtggacggcgtggaagtgcacaatgccaagaccaagcctagagaggaacagtacaacagcacctacagagtggtgtccgtgctgaccgtgctgcaccaggattggctgaacggcaaagagtacaagtgcaaggtgtccaacaaggccctgcctctgcctgaggaaaagaccatcagcaaggccaag

SEQ ID NO: 101 - DNA, 330 bp, synthetic construct
  source 1..330: mol_type = other DNA
gctccagaactgctggccggaccttccgtgttcctgtttcctccaaagcctaaggacaccctgatgatcagcagaacccctgaagtgacctgcgtggtggtggatgtgtctcacgaggaccccgaagtgaagttcaattggtacgtggacggcgtggaagtgcacaatgccaagaccaagcctagagaggaacagtacaacagcacctacagagtggtgtccgtgctgaccgtgctgcaccaggattggctgaacggcaaagagtacaagtgcaaggtgtccaacaaggccctgcctctgcctgaggaaaagaccatcagcaaggccaag

SEQ ID NO: 102 - protein, 108 aa, synthetic construct
APELLAGPSVFLFPPKPKDTLMISRTPEVTCVVVDVSHEDPEVKFNWYVDGVEVHNAKTKPREEQYNSTYRVVSVLTVLHQDWLNGKEYKCKVSNKALPLPEEKTISK

SEQ ID NO: 103 - RNA, 330 nt, synthetic construct; identical to SEQ ID NO: 100
  source 1..330: mol_type = other RNA

SEQ ID NO: 104 - protein, 110 aa, synthetic construct
APELLAGPSVFLFPPKPKDTLMISRTPEVTCVVVDVSHEDPEVKFNWYVDGVEVHNAKTKPREEQYNSTYRVVSVLTVLHQDWLNGKEYKCKVSNKALPAPEEKTISKAK

SEQ ID NO: 105 - RNA, 330 nt, synthetic construct
  source 1..330: mol_type = other RNA
gctccagaactgctggccggaccttccgtgttcctgtttcctccaaagcctaaggacaccctgatgatcagcagaacccctgaagtgacctgcgtggtggtggatgtgtctcacgaggaccctgaagtgaagttcaattggtacgtggacggcgtggaagtgcacaacgccaagaccaagcctagagaggaacagtacaacagcacctacagagtggtgtccgtgctgaccgtgctgcaccaggattggctgaacggcaaagagtacaagtgcaaggtgtccaacaaggccctgcctgcccctgaggaaaagaccatcagcaaggccaag

SEQ ID NO: 106 - DNA, 330 bp, synthetic construct
  source 1..330: mol_type = other DNA
gctccagaactgctggccggaccttccgtgttcctgtttcctccaaagcctaaggacaccctgatgatcagcagaacccctgaagtgacctgcgtggtggtggatgtgtctcacgaggaccctgaagtgaagttcaattggtacgtggacggcgtggaagtgcacaacgccaagaccaagcctagagaggaacagtacaacagcacctacagagtggtgtccgtgctgaccgtgctgcaccaggattggctgaacggcaaagagtacaagtgcaaggtgtccaacaaggccctgcctgcccctgaggaaaagaccatcagcaaggccaag

SEQ ID NO: 107 - protein, 108 aa, synthetic construct
APELLAGPSVFLFPPKPKDTLMISRTPEVTCVVVDVSHEDPEVKFNWYVDGVEVHNAKTKPREEQYNSTYRVVSVLTVLHQDWLNGKEYKCKVSNKALPAPIEKTISK

SEQ ID NO: 108 - RNA, 330 nt, synthetic construct
  source 1..330: mol_type = other RNA
gctccagaactgctggccggaccttccgtgttcctgtttcctccaaagcctaaggacaccctgatgatcagcagaacccctgaagtgacctgcgtggtggtggatgtgtctcacgaggaccctgaagtgaagttcaattggtacgtggacggcgtggaagtgcacaacgccaagaccaagcctagagaggaacagtacaacagcacctacagagtggtgtccgtgctgaccgtgctgcaccaggattggctgaacggcaaagagtacaagtgcaaggtgtccaacaaggccctgcctgcccctatcgaaaagaccatcagcaaggccaag

SEQ ID NO: 109 - DNA, 330 bp, synthetic construct
  source 1..330: mol_type = other DNA
gctccagaactgctggccggaccttccgtgttcctgtttcctccaaagcctaaggacaccctgatgatcagcagaacccctgaagtgacctgcgtggtggtggatgtgtctcacgaggaccctgaagtgaagttcaattggtacgtggacggcgtggaagtgcacaacgccaagaccaagcctagagaggaacagtacaacagcacctacagagtggtgtccgtgctgaccgtgctgcaccaggattggctgaacggcaaagagtacaagtgcaaggtgtccaacaaggccctgcctgcccctatcgaaaagaccatcagcaaggccaag

SEQ ID NO: 110 - protein, 108 aa, synthetic construct
APELLGGPSVFLFPPKPKDTLMISRTPEVTCVVVDVSHEDPEVKFNWYVDGVEVHNAKTKPREEQYNSTYRVVSVLTVLHQDWLNGKEYKCKVSNKALPAPEEKTISK

SEQ ID NO: 111 - RNA, 330 nt, synthetic construct
  source 1..330: mol_type = other RNA
gctccagaactgctgggcggaccttccgtgttcctgtttcctccaaagcctaaggacaccctgatgatcagcagaacccctgaagtgacctgcgtggtggtggatgtgtctcacgaggaccctgaagtgaagttcaattggtacgtggacggcgtggaagtgcacaacgccaagaccaagcctagagaggaacagtacaacagcacctacagagtggtgtccgtgctgaccgtgctgcaccaggattggctgaacggcaaagagtacaagtgcaaggtgtccaacaaggccctgcctgcccctgaggaaaagaccatcagcaaggccaag

SEQ ID NO: 112 - DNA, 330 bp, synthetic construct
  source 1..330: mol_type = other DNA
gctccagaactgctgggcggaccttccgtgttcctgtttcctccaaagcctaaggacaccctgatgatcagcagaacccctgaagtgacctgcgtggtggtggatgtgtctcacgaggaccctgaagtgaagttcaattggtacgtggacggcgtggaagtgcacaacgccaagaccaagcctagagaggaacagtacaacagcacctacagagtggtgtccgtgctgaccgtgctgcaccaggattggctgaacggcaaagagtacaagtgcaaggtgtccaacaaggccctgcctgcccctgaggaaaagaccatcagcaaggccaag

SEQ ID NO: 113 - protein, 107 aa, synthetic construct
GQPREPQVYTLPPSREEMTKNQVSLTCLVKGFYPSDIAVEWESNGQPENNYKTTPPVLDSDGSFFLYSKLTVDKSRWQQGNVFSCSVMHEALHNHYTQKSLSLSPGK

SEQ ID NO: 114 - RNA, 327 nt, synthetic construct
  source 1..327: mol_type = other RNA
ggccagcctagggaaccccaggtttacacactgcctccaagccgcgaggaaatgaccaagaaccaggtgtccctgacctgcctcgtgaagggcttctacccttccgatatcgccgtggaatgggagagcaatggccagcctgagaacaactacaagacaacccctcctgtgctggacagcgacggctcattcttcctgtacagcaagctgactgtggataagtcccggtggcagcagggcaacgtgttcagctgttctgtgatgcacgaagccctgcacaaccactacacccagaaaagcctgtctctgagccccggcaagtgataa

SEQ ID NO: 115 - DNA, 327 bp, synthetic construct
  source 1..327: mol_type = other DNA
ggccagcctagggaaccccaggtttacacactgcctccaagccgcgaggaaatgaccaagaaccaggtgtccctgacctgcctcgtgaagggcttctacccttccgatatcgccgtggaatgggagagcaatggccagcctgagaacaactacaagacaacccctcctgtgctggacagcgacggctcattcttcctgtacagcaagctgactgtggataagtcccggtggcagcagggcaacgtgttcagctgttctgtgatgcacgaagccctgcacaaccactacacccagaaaagcctgtctctgagccccggcaagtgataa

SEQ ID NO: 116 - protein, 107 aa, synthetic construct
GQPREPQVYTLPPSREEMTKNQVSLTCLVKGFYPSDIAVEWESNGQPENNYKTTPPVLDSDGSFFLYSKLTVDKSRWQQGNVFSCSVLHEALHSHYTQKSLSLSPGK

SEQ ID NO: 117 - RNA, 327 nt, synthetic construct
  source 1..327: mol_type = other RNA
ggccagcctagggaaccccaggtttacacactgcctccaagccgcgaggaaatgaccaagaaccaggtgtccctgacctgcctcgtgaagggcttctacccttccgatatcgccgtggaatgggagagcaatggccagcctgagaacaactacaagacaacccctcctgtgctggacagcgacggctcattcttcctgtacagcaagctgaccgtggacaagtccagatggcagcagggcaacgtgttcagctgtagcgtgctgcacgaagccctgcacagccactacacccagaaaagcctgtctctgagccccggcaaatgataa

SEQ ID NO: 118 - DNA, 327 bp, synthetic construct
  source 1..327: mol_type = other DNA
ggccagcctagggaaccccaggtttacacactgcctccaagccgcgaggaaatgaccaagaaccaggtgtccctgacctgcctcgtgaagggcttctacccttccgatatcgccgtggaatgggagagcaatggccagcctgagaacaactacaagacaacccctcctgtgctggacagcgacggctcattcttcctgtacagcaagctgaccgtggacaagtccagatggcagcagggcaacgtgttcagctgtagcgtgctgcacgaagccctgcacagccactacacccagaaaagcctgtctctgagccccggcaaatgataa

SEQ ID NO: 119 - protein, 107 aa, synthetic construct
GQPREPQVCTLPPSREEMTKNQVSLSCAVKGFYPSDIAVEWESNGQPENNYKTTPPVLDSDGSFFLVSKLTVDKSRWQQGNVFSCSVMHEALHNHYTQKSLSLSPGK

SEQ ID NO: 120 - RNA, 327 nt, synthetic construct
  source 1..327: mol_type = other RNA
ggccagcctcgcgaacctcaagtctgtacactgcctcctagccgcgaggaaatgaccaagaaccaggtgtccctgagctgcgccgtgaagggcttttacccttccgatatcgccgtggaatgggagagcaatggccagcctgagaacaactacaagacaacccctcctgtgctggacagcgacggctcattcttcctggtgtccaagctgacagtggacaagagcagatggcagcagggcaacgtgttcagctgcagcgtgatgcatgaagccctgcacaaccactacacccagaagtccctgtctctgagccccggcaagtgataa

SEQ ID NO: 121 - DNA, 327 bp, synthetic construct
  source 1..327: mol_type = other DNA
ggccagcctcgcgaacctcaagtctgtacactgcctcctagccgcgaggaaatgaccaagaaccaggtgtccctgagctgcgccgtgaagggcttttacccttccgatatcgccgtggaatgggagagcaatggccagcctgagaacaactacaagacaacccctcctgtgctggacagcgacggctcattcttcctggtgtccaagctgacagtggacaagagcagatggcagcagggcaacgtgttcagctgcagcgtgatgcatgaagccctgcacaaccactacacccagaagtccctgtctctgagccccggcaagtgataa

SEQ ID NO: 122 - protein, 107 aa, synthetic construct
GQPREPQVCTLPPSREEMTKNQVSLSCAVKGFYPSDIAVEWESNGQPENNYKTTPPVLDSDGSFFLVSKLTVDKSRWQQGNVFSCSVLHEALHSHYTQKSLSLSPGK

SEQ ID NO: 123 - RNA, 327 nt, synthetic construct
  source 1..327: mol_type = other RNA
ggccagcctagggaaccccaagtctgtacactgcctcctagccgcgaggaaatgaccaagaaccaggtgtccctgagctgcgccgtgaagggcttttacccttccgatatcgccgtggaatgggagagcaatggccagcctgagaacaactacaagacaacccctcctgtgctggacagcgacggctcattcttcctggtgtccaagctgacagtggacaagagcagatggcagcagggcaacgtgttcagctgctctgtgctgcacgaagccctgcacagccactacacccagaagtccctgtctctgagccccggcaagtgataa

SEQ ID NO: 124 - DNA, 327 bp, synthetic construct
  source 1..327: mol_type = other DNA
ggccagcctagggaaccccaagtctgtacactgcctcctagccgcgaggaaatgaccaagaaccaggtgtccctgagctgcgccgtgaagggcttttacccttccgatatcgccgtggaatgggagagcaatggccagcctgagaacaactacaagacaacccctcctgtgctggacagcgacggctcattcttcctggtgtccaagctgacagtggacaagagcagatggcagcagggcaacgtgttcagctgctctgtgctgcacgaagccctgcacagccactacacccagaagtccctgtctctgagccccggcaagtgataa

SEQ ID NO: 125 - protein, 107 aa, synthetic construct
GQPREPQVYTLPPCREEMTKNQVSLWCLVKGFYPSDIAVEWESNGQPENNYKTTPPVLDSDGSFFLYSKLTVDKSRWQQGNVFSCSVMHEALHNHYTQKSLSLSPGK

SEQ ID NO: 126 - RNA, 327 nt, synthetic construct
  source 1..327: mol_type = other RNA
ggccagcctagggaaccccaggtttacaccctgcctccatgccgcgaggaaatgaccaagaaccaggtgtccctgtggtgcctggtcaagggcttctacccttccgatatcgccgtggaatgggagagcaatggccagcctgagaacaactacaagacaacccctcctgtgctggacagcgacggctcattcttcctgtacagcaagctgacagtggacaagagcagatggcagcagggcaacgtgttcagctgcagcgtgatgcatgaagccctgcacaaccactacacccagaagtccctgtctctgagccccggcaagtgataa

SEQ ID NO: 127 - DNA, 327 bp, synthetic construct
  source 1..327: mol_type = other DNA
ggccagcctagggaaccccaggtttacaccctgcctccatgccgcgaggaaatgaccaagaaccaggtgtccctgtggtgcctggtcaagggcttctacccttccgatatcgccgtggaatgggagagcaatggccagcctgagaacaactacaagacaacccctcctgtgctggacagcgacggctcattcttcctgtacagcaagctgacagtggacaagagcagatggcagcagggcaacgtgttcagctgcagcgtgatgcatgaagccctgcacaaccactacacccagaagtccctgtctctgagccccggcaagtgataa

SEQ ID NO: 128 - protein, 107 aa, synthetic construct
GQPREPQVYTLPPCREEMTKNQVSLWCLVKGFYPSDIAVEWESNGQPENNYKTTPPVLDSDGSFFLYSKLTVDKSRWQQGNVFSCSVLHEALHSHYTQKSLSLSPGK

SEQ ID NO: 129 - RNA, 327 nt, synthetic construct
  source 1..327: mol_type = other RNA
ggccagcctagggaaccccaggtttacaccctgcctccatgccgcgaggaaatgaccaagaaccaggtgtccctgtggtgcctcgtgaagggcttctacccttccgatatcgccgtggaatgggagagcaatggccagcctgagaacaactacaagacaacccctcctgtgctggacagcgacggctcattcttcctgtacagcaagctgaccgtggacaagtccagatggcagcagggcaacgtgttcagctgtagcgtgctgcacgaagccctgcacagccactacacccagaagtccctgtctctgagccccggcaagtgataa

SEQ ID NO: 130 - DNA, 327 bp, synthetic construct
  source 1..327: mol_type = other DNA
ggccagcctagggaaccccaggtttacaccctgcctccatgccgcgaggaaatgaccaagaaccaggtgtccctgtggtgcctcgtgaagggcttctacccttccgatatcgccgtggaatgggagagcaatggccagcctgagaacaactacaagacaacccctcctgtgctggacagcgacggctcattcttcctgtacagcaagctgaccgtggacaagtccagatggcagcagggcaacgtgttcagctgtagcgtgctgcacgaagccctgcacagccactacacccagaagtccctgtctctgagccccggcaagtgataa

SEQ ID NO: 131 - protein, 107 aa, synthetic construct
GQPREPQVYTLPPSRDELTKNQVSLTCLVKGFYPSDIAVEWESNGQPENNYKTTPPVLDSDGSFFLYSKLTVDKSRWQQGNVFSCSVMHEALHNHYTQKSLSLSPGK

SEQ ID NO: 132 - RNA, 327 nt, synthetic construct
  source 1..327: mol_type = other RNA
ggccagcctagggaaccccaggtttacacactgcctccaagccgcgacgaactgaccaagaaccaggtgtccctgacctgcctcgtgaagggcttctacccttccgatatcgccgtggaatgggagagcaatggccagcctgagaacaactacaagacaacccctcctgtgctggacagcgacggctcattcttcctgtacagcaagctgactgtggataagtcccggtggcagcagggcaacgtgttcagctgttctgtgatgcacgaagccctgcacaaccactacacccagaaaagcctgtctctgagccccggcaagtgataa

SEQ ID NO: 133 - DNA, 327 bp, synthetic construct
  source 1..327: mol_type = other DNA
ggccagcctagggaaccccaggtttacacactgcctccaagccgcgacgaactgaccaagaaccaggtgtccctgacctgcctcgtgaagggcttctacccttccgatatcgccgtggaatgggagagcaatggccagcctgagaacaactacaagacaacccctcctgtgctggacagcgacggctcattcttcctgtacagcaagctgactgtggataagtcccggtggcagcagggcaacgtgttcagctgttctgtgatgcacgaagccctgcacaaccactacacccagaaaagcctgtctctgagccccggcaagtgataa

SEQ ID NO: 134 - protein, 107 aa, synthetic construct
GQPREPQVYTLPPSRDELTKNQVSLTCLVKGFYPSDIAVEWESNGQPENNYKTTPPVLDSDGSFFLYSKLTVDKSRWQQGNVFSCSVLHEALHSHYTQKSLSLSPGK

SEQ ID NO: 135 - RNA, 327 nt, synthetic construct
  source 1..327: mol_type = other RNA
ggccagcctagggaaccccaggtttacacactgcctccaagccgcgacgaactgaccaagaaccaggtgtccctgacctgcctcgtgaagggcttctacccttccgatatcgccgtggaatgggagagcaatggccagcctgagaacaactacaagacaacccctcctgtgctggacagcgacggctcattcttcctgtacagcaagctgaccgtggacaagtccagatggcagcagggcaacgtgttcagctgtagcgtgctgcacgaagccctgcacagccactacacccagaaaagcctgtctctgagccccggcaaatgataa

SEQ ID NO: 136 - DNA, 327 bp, synthetic construct
  source 1..327: mol_type = other DNA
ggccagcctagggaaccccaggtttacacactgcctccaagccgcgacgaactgaccaagaaccaggtgtccctgacctgcctcgtgaagggcttctacccttccgatatcgccgtggaatgggagagcaatggccagcctgagaacaactacaagacaacccctcctgtgctggacagcgacggctcattcttcctgtacagcaagctgaccgtggacaagtccagatggcagcagggcaacgtgttcagctgtagcgtgctgcacgaagccctgcacagccactacacccagaaaagcctgtctctgagccccggcaaatgataa

SEQ ID NO: 137 - protein, 107 aa, synthetic construct
GQPREPQVCTLPPSRDELTKNQVSLSCAVKGFYPSDIAVEWESNGQPENNYKTTPPVLDSDGSFFLVSKLTVDKSRWQQGNVFSCSVMHEALHNHYTQKSLSLSPGK

SEQ ID NO: 138 - RNA, 327 nt, synthetic construct
  source 1..327: mol_type = other RNA
ggccagcctcgcgaacctcaagtctgtacactgcctcctagccgcgacgaactgaccaagaaccaggtgtccctgagctgcgccgtgaagggcttttacccttccgatatcgccgtggaatgggagagcaatggccagcctgagaacaactacaagacaacccctcctgtgctggacagcgacggctcattcttcctggtgtccaagctgacagtggacaagagcagatggcagcagggcaacgtgttcagctgcagcgtgatgcatgaagccctgcacaaccactacacccagaagtccctgtctctgagccccggcaagtgataa

SEQ ID NO: 139 - DNA, 327 bp, synthetic construct
  source 1..327: mol_type = other DNA
ggccagcctcgcgaacctcaagtctgtacactgcctcctagccgcgacgaactgaccaagaaccaggtgtccctgagctgcgccgtgaagggcttttacccttccgatatcgccgtggaatgggagagcaatggccagcctgagaacaactacaagacaacccctcctgtgctggacagcgacggctcattcttcctggtgtccaagctgacagtggacaagagcagatggcagcagggcaacgtgttcagctgcagcgtgatgcatgaagccctgcacaaccactacacccagaagtccctgtctctgagccccggcaagtgataa

SEQ ID NO: 140 - protein, 107 aa, synthetic construct
GQPREPQVCTLPPSRDELTKNQVSLSCAVKGFYPSDIAVEWESNGQPENNYKTTPPVLDSDGSFFLVSKLTVDKSRWQQGNVFSCSVLHEALHSHYTQKSLSLSPGK

SEQ ID NO: 141 - RNA, 327 nt, synthetic construct
  source 1..327: mol_type = other RNA
ggccagcctcgcgaacctcaagtctgtacactgcctcctagccgcgacgaactgaccaagaaccaggtgtccctgagctgcgccgtgaagggcttttacccttccgatatcgccgtggaatgggagagcaatggccagcctgagaacaactacaagacaacccctcctgtgctggacagcgacggctcattcttcctggtgtccaagctgacagtggacaagagcagatggcagcagggcaacgtgttcagctgcagcgtgctgcatgaagccctgcacagccactacacccagaagtccctgtctctgagccccggcaagtgataa

SEQ ID NO: 142 - DNA, 327 bp, synthetic construct
  source 1..327: mol_type = other DNA
ggccagcctcgcgaacctcaagtctgtacactgcctcctagccgcgacgaactgaccaagaaccaggtgtccctgagctgcgccgtgaagggcttttacccttccgatatcgccgtggaatgggagagcaatggccagcctgagaacaactacaagacaacccctcctgtgctggacagcgacggctcattcttcctggtgtccaagctgacagtggacaagagcagatggcagcagggcaacgtgttcagctgcagcgtgctgcatgaagccctgcacagccactacacccagaagtccctgtctctgagccccggcaagtgataa

SEQ ID NO: 143 - protein, 107 aa, synthetic construct
GQPREPQVYTLPPCRDELTKNQVSLWCLVKGFYPSDIAVEWESNGQPENNYKTTPPVLDSDGSFFLYSKLTVDKSRWQQGNVFSCSVMHEALHNHYTQKSLSLSPGK

SEQ ID NO: 144 - RNA, 327 nt, synthetic construct
  source 1..327: mol_type = other RNA
ggccagcctagggaaccccaggtttacaccctgcctccatgccgcgacgaactgaccaagaaccaggtgtccctgtggtgcctggtcaagggcttctacccttccgatatcgccgtggaatgggagagcaatggccagcctgagaacaactacaagacaacccctcctgtgctggacagcgacggctcattcttcctgtacagcaagctgacagtggacaagagcagatggcagcagggcaacgtgttcagctgcagcgtgatgcatgaagccctgcacaaccactacacccagaagtccctgtctctgagccccggcaagtgataa

SEQ ID NO: 145 - DNA, 327 bp, synthetic construct
  source 1..327: mol_type = other DNA
ggccagcctagggaaccccaggtttacaccctgcctccatgccgcgacgaactgaccaagaaccaggtgtccctgtggtgcctggtcaagggcttctacccttccgatatcgccgtggaatgggagagcaatggccagcctgagaacaactacaagacaacccctcctgtgctggacagcgacggctcattcttcctgtacagcaagctgacagtggacaagagcagatggcagcagggcaacgtgttcagctgcagcgtgatgcatgaagccctgcacaaccactacacccagaagtccctgtctctgagccccggcaagtgataa

SEQ ID NO: 146 - protein, 107 aa, synthetic construct
GQPREPQVYTLPPCRDELTKNQVSLWCLVKGFYPSDIAVEWESNGQPENNYKTTPPVLDSDGSFFLYSKLTVDKSRWQQGNVFSCSVLHEALHSHYTQKSLSLSPGK

SEQ ID NO: 147 - RNA, 327 nt, synthetic construct
  source 1..327: mol_type = other RNA
ggccagcctagggaaccccaggtttacaccctgcctccatgccgcgacgaactgaccaagaaccaggtgtccctgtggtgcctggtcaagggcttctacccttccgatatcgccgtggaatgggagagcaatggccagcctgagaacaactacaagacaacccctcctgtgctggacagcgacggctcattcttcctgtacagcaagctgacagtggacaagagcagatggcagcagggcaacgtgttcagctgcagcgtgctgcatgaagccctgcacagccactacacccagaagtccctgtctctgagccccggcaagtgataa

SEQ ID NO: 148 - DNA, 327 bp, synthetic construct
  source 1..327: mol_type = other DNA
ggccagcctagggaaccccaggtttacaccctgcctccatgccgcgacgaactgaccaagaaccaggtgtccctgtggtgcctggtcaagggcttctacccttccgatatcgccgtggaatgggagagcaatggccagcctgagaacaactacaagacaacccctcctgtgctggacagcgacggctcattcttcctgtacagcaagctgacagtggacaagagcagatggcagcagggcaacgtgttcagctgcagcgtgctgcatgaagccctgcacagccactacacccagaagtccctgtctctgagccccggcaagtgataa

SEQ ID NO: 149 - protein, 107 aa, synthetic construct [sequence omitted]

SEQ ID NO: 150 - RNA, 327 nt, synthetic construct
  source 1..327: mol_type = other RNA
cgtacggtggccgctcctagcgtgttcatctttccacctagcgacgagcagctgaagtctggcacagcctctgtcgtgtgcctgctcaacaacttctaccccagagaagccaaggtgcagtggaaggtggacaacgccctgcagagcggcaatagccaagagagcgtgaccgagcaggacagcaaggactctacctacagcctgagcagcacactgaccctgagcaaggccgactacgagaagcacaaagtgtacgcctgcgaagtgacccaccagggcctttctagccctgtgaccaagagcttcaaccggggcgagtgctgataa

SEQ ID NO: 151 - DNA, 327 bp, synthetic construct
  source 1..327: mol_type = other DNA
cgtacggtggccgctcctagcgtgttcatctttccacctagcgacgagcagctgaagtctggcacagcctctgtcgtgtgcctgctcaacaacttctaccccagagaagccaaggtgcagtggaaggtggacaacgccctgcagagcggcaatagccaagagagcgtgaccgagcaggacagcaaggactctacctacagcctgagcagcacactgaccctgagcaaggccgactacgagaagcacaaagtgtacgcctgcgaagtgacccaccagggcctttctagccctgtgaccaagagcttcaaccggggcgagtgctgataa

SEQ ID NO: 152 - protein, 107 aa, synthetic construct
ASVAAPSVFIFPPSDEELKSGTASVVCLLNNFYPREAKVQWKVDNALQSGNSQESVTEQDSKDSTYSLSSTLTLSKADYEKHKVYACEVTHQGLSSPVTKSFNRGEC

SEQ ID NO: 153 - RNA, 321 nt, synthetic construct
  source 1..321: mol_type = other RNA
gcatctgtggccgctcctagcgtgttcatcttcccacctagcgacgaggaactgaagtctggcacagccagcgtcgtgtgcctgctgaacaacttctaccccagagaagccaaggtgcagtggaaggtggacaacgccctgcagagcggcaatagccaagagagcgtgaccgagcaggacagcaaggactctacctacagcctgagcagcaccctgacactgagcaaggccgactacgagaagcacaaagtgtacgcctgcgaagtgacccaccagggcctttctagccctgtgaccaagagcttcaaccggggcgagtgc

SEQ ID NO: 154 - DNA, 321 bp, synthetic construct
  source 1..321: mol_type = other DNA
gcatctgtggccgctcctagcgtgttcatcttcccacctagcgacgaggaactgaagtctggcacagccagcgtcgtgtgcctgctgaacaacttctaccccagagaagccaaggtgcagtggaaggtggacaacgccctgcagagcggcaatagccaagagagcgtgaccgagcaggacagcaaggactctacctacagcctgagcagcaccctgacactgagcaaggccgactacgagaagcacaaagtgtacgcctgcgaagtgacccaccagggcctttctagccctgtgaccaagagcttcaaccggggcgagtgc

SEQ ID NO: 155 - protein, 107 aa, synthetic construct
RTVAAPSVFIFPPSDKRLKSGTASVVCLLNNFYPREAKVQWKVDNALQSGNSQESVTEQDSKDSTYSLSSTLTLSKADYEKHKVYACEVTHQGLSSPVTKSFNRGEC

SEQ ID NO: 156 - RNA, 327 nt, synthetic construct
  source 1..327: mol_type = other RNA
cgtacggtggccgctcctagcgtgttcatctttccacctagcgacaagagactgaagtctggcacagcctctgtcgtgtgcctgctcaacaacttctaccccagagaagccaaggtgcagtggaaggtggacaacgccctgcagagcggcaatagccaagagagcgtgaccgagcaggacagcaaggactctacctacagcctgagcagcacactgaccctgagcaaggccgactacgagaagcacaaagtgtacgcctgcgaagtgacccaccagggcctttctagccctgtgaccaagagcttcaaccggggcgagtgctgataa

SEQ ID NO: 157 - DNA, 327 bp, synthetic construct
  source 1..327: mol_type = other DNA
cgtacggtggccgctcctagcgtgttcatctttccacctagcgacaagagactgaagtctggcacagcctctgtcgtgtgcctgctcaacaacttctaccccagagaagccaaggtgcagtggaaggtggacaacgccctgcagagcggcaatagccaagagagcgtgaccgagcaggacagcaaggactctacctacagcctgagcagcacactgaccctgagcaaggccgactacgagaagcacaaagtgtacgcctgcgaagtgacccaccagggcctttctagccctgtgaccaagagcttcaaccggggcgagtgctgataa

SEQ ID NO: 158 - protein, 107 aa, synthetic construct
RTVAAPSVFIFPPSDRKLKSGTASVVCLLNNFYPREAKVQWKVDNALQSGNSQESVTEQDSKDSTYSLSSTLTLSKADYEKHKVYACEVTHQGLSSPVTKSFNRGEC

SEQ ID NO: 159 - RNA, 327 nt, synthetic construct
  source 1..327: mol_type = other RNA
cgtacggtggccgctcctagcgtgttcatctttccacctagcgacagaaagctgaagtctggcacagcctctgtcgtgtgcctgctcaacaacttctaccccagagaagccaaggtgcagtggaaggtggacaacgccctgcagagcggcaatagccaagagagcgtgaccgagcaggacagcaaggactctacctacagcctgagcagcacactgaccctgagcaaggccgactacgagaagcacaaagtgtacgcctgcgaagtgacccaccagggcctttctagccctgtgaccaagagcttcaaccggggcgagtgctgataa

SEQ ID NO: 160 - DNA, 327 bp, synthetic construct
  source 1..327: mol_type = other DNA
cgtacggtggccgctcctagcgtgttcatctttccacctagcgacagaaagctgaagtctggcacagcctctgtcgtgtgcctgctcaacaacttctaccccagagaagccaaggtgcagtggaaggtggacaacgccctgcagagcggcaatagccaagagagcgtgaccgagcaggacagcaaggactctacctacagcctgagcagcacactgaccctgagcaaggccgactacgagaagcacaaagtgtacgcctgcgaagtgacccaccagggcctttctagccctgtgaccaagagcttcaaccggggcgagtgctgataa

SEQ ID NO: 161 - protein, 15 aa, synthetic construct
EPKSCDKTHTCPPCP

SEQ ID NO: 162 - RNA, 45 nt, synthetic construct
  source 1..45: mol_type = other RNA
gaacccaagagctgcgacaagacccacacctgtcctccatgtcct

SEQ ID NO: 163 - DNA, 45 bp, synthetic construct
  source 1..45: mol_type = other DNA
gaacccaagagctgcgacaagacccacacctgtcctccatgtcct

SEQ ID NO: 164 - protein, 15 aa, synthetic construct
EPKSSDKTHTCPPCP

SEQ ID NO: 165 - RNA, 45 nt, synthetic construct
  source 1..45: mol_type = other RNA
gaacctaagagcagcgacaagacccacacctgtcctccatgtcct

SEQ ID NO: 166 - DNA, 45 bp, synthetic construct
  source 1..45: mol_type = other DNA
gaacctaagagcagcgacaagacccacacctgtcctccatgtcct

SEQ ID NO: 167 - protein, 10 aa, synthetic construct
DKTHTCPPCP

SEQ ID NO: 168 - RNA, 30 nt, synthetic construct
  source 1..30: mol_type = other RNA
gataagacccacacctgtcctccatgtcca

SEQ ID NO: 169 - DNA, 30 bp, synthetic construct
  source 1..30: mol_type = other DNA
gataagacccacacctgtcctccatgtcca

SEQ ID NO: 170 - DNA, 1476 bp, synthetic construct
  source 1..1476: mol_type = other DNA
atggattggatttggagaatcctgttcctcgtgggcgccgctaccggagcccactcccaggtgcatctgacgcagtctgggcctgaggtgaggaagcctgggacctccgtaaaggtctcctgcaaggcccctggaaacacattgaagacttatgatctacactgggtgcgcagcgtccctggacaaggccttcagtggatgggatggataagccatgagggcgacaagaaggtcattgtggaaagattcaaggccaaagtcaccattgattgggacaggtccaccaatacggcctatctccaactgagcggcctcacatctggcgacacggccgtctattattgtgcgaaaggctcaaaacacaggctgcgagattacgctctctacgacgacgacggcgcattgaattgggctgtcgatgttgactacctttcgaacttggaattctggggccaagggaccgccgtcaccgtctcttcagcctctacaaagggccctagcgtgttccctctggctcctagcagcaagtcgacatctggcggaacagccgctctgggctgtctggtcaaggactactttcccgagcctgtgacagtgtcctggaactctggcgctctgacaagcggcgtgcacacatttccagccgtgctgcaaagcagcggcctgtactctctgagcagcgtggtcacagtgccaagctctagcctgggcacccagacctacatctgcaatgtgaaccacaagcctagcaacaccaaggtggacaagagagtggaacccaagagctgcgacaagacccacacctgtcctccatgtcctgctccagaactgctcggcggaccttccgtgttcctgtttcctccaaagcctaaggacaccctgatgatcagcagaacccctgaagtgacctgcgtggtggtggatgtgtctcacgaggaccccgaagtgaagttcaattggtacgtggacggcgtggaagtgcacaacgccaagaccaagcctagagaggaacagtacaacagcacctacagagtggtgtccgtgctgacagtgctgcaccaggattggctgaacggcaaagagtacaagtgcaaggtgtccaacaaggccctgcctgctcctatcgagaaaaccatcagcaaggccaagggccagcctagggaaccccaggtttacacactgcctccaagccgcgaggaaatgaccaagaaccaggtgtccctgacctgcctcgtgaagggcttctacccttccgatatcgccgtggaatgggagagcaatggccagcctgagaacaactacaagacaacccctcctgtgctggacagcgacggctcattcttcctgtacagcaagctgactgtggataagtcccggtggcagcagggcaacgtgttcagctgttctgtgatgcacgaagccctgcacaaccactacacccagaaaagcctgtctctgagccccggcaagtgataa

SEQ ID NO: 171 - DNA, 1476 bp, synthetic construct
  source 1..1476: mol_type = other DNA
atggattggatttggagaatcctgttcctcgtgggcgccgctaccggagcccactcccaggtgcatctgacgcagtctgggcctgaggtgaggaagcctgggacctccgtaaaggtctcctgcaaggcccctggaaacacattgaagacttatgatctacactgggtgcgcagcgtccctggacaaggccttcagtggatgggatggataagccatgagggcgacaagaaggtcattgtggaaagattcaaggccaaagtcaccattgattgggacaggtccaccaatacggcctatctccaactgagcggcctcacatctggcgacacggccgtctattattgtgcgaaaggctcaaaacacaggctgcgagattacgctctctacgacgacgacggcgcattgaattgggctgtcgatgttgactacctttcgaacttggaattctggggccaagggaccgccgtcaccgtctcttcagcctctacaaagggccctagcgtgttccctctggctcctagcagcaagtcgacatctggcggaacagccgctctgggctgtctggtcaaggactactttcccgagcctgtgacagtgtcctggaactctggcgctctgacaagcggcgtgcacacatttccagccgtgctgcaaagcagcggcctgtactctctgagcagcgtggtcacagtgccaagctctagcctgggcacccagacctacatctgcaatgtgaaccacaagcctagcaacaccaaggtggacaagagagtggaacccaagagctgcgacaagacccacacctgtcctccatgtcctgctccagaactgctcggcggaccttccgtgttcctgtttcctccaaagcctaaggacaccctgatgatcagcagaacccctgaagtgacctgcgtggtggtggatgtgtctcacgaggaccccgaagtgaagttcaattggtacgtggacggcgtggaagtgcacaacgccaagaccaagcctagagaggaacagtacaacagcacctacagagtggtgtccgtgctgacagtgctgcaccaggattggctgaacggcaaagagtacaagtgcaaggtgtccaacaaggccctgcctgctcctatcgagaaaaccatcagcaaggccaagggccagcctagggaaccccaggtttacacactgcctccaagccgcgaggaaatgaccaagaaccaggtgtccctgacctgcctcgtgaagggcttctacccttccgatatcgccgtggaatgggagagcaatggccagcctgagaacaactacaagacaacccctcctgtgctggacagcgacggctcattcttcctgtacagcaagctgaccgtggacaagtccagatggcagcagggcaacgtgttcagctgtagcgtgctgcacgaagccctgcacagccactacacccagaaaagcctgtctctgagccccggcaaatgataa

SEQ ID NO: 172 - DNA, 1476 bp, synthetic construct
  source 1..1476: mol_type = other DNA
atggattggatttggagaatcctgttcctcgtgggcgccgctaccggagcccactcccaggtgcatctgacgcagtctgggcctgaggtgaggaagcctgggacctccgtaaaggtctcctgcaaggcccctggaaacacattgaagacttatgatctacactgggtgcgcagcgtccctggacaaggccttcagtggatgggatggataagccatgagggcgacaagaaggtcattgtggaaagattcaaggccaaagtcaccattgattgggacaggtccaccaatacggcctatctccaactgagcggcctcacatctggcgacacggccgtctattattgtgcgaaaggctcaaaacacaggctgcgagattacgctctctacgacgacgacggcgcattgaattgggctgtcgatgttgactacctttcgaacttggaattctggggccaagggaccgccgtcaccgtctcttcagcctctacaaagggccctagcgtgttccctctggctcctagcagcaagtcgacatctggcggaacagccgctctgggctgtctggtcaaggactactttcccgagcctgtgacagtgtcctggaactctggcgctctgacaagcggcgtgcacacatttccagccgtgctgcaaagcagcggcctgtactctctgagcagcgtggtcacagtgccaagctctagcctgggcacccagacctacatctgcaatgtgaaccacaagcctagcaacaccaaggtggacaagagagtggaacccaagagctgcgacaagacccacacctgtcctccatgtcctgctccagaactgctcggcggaccttccgtgttcctgtttcctccaaagcctaaggacaccctgatgatcagcagaacccctgaagtgacctgcgtggtggtggatgtgtctcacgaggaccccgaagtgaagttcaattggtacgtggacggcgtggaagtgcacaacgccaagaccaagcctagagaggaacagtacaacagcacctacagagtggtgtccgtgctgacagtgctgcaccaggattggctgaacggcaaagagtacaagtgcaaggtgtccaacaaggccctgcctgctcctatcgagaaaaccatcagcaaggccaagggccagcctagggaaccccaagtctgtacactgcctcctagccgcgaggaaatgaccaagaaccaggtgtccctgagctgcgccgtgaagggcttttacccttccgatatcgccgtggaatgggagagcaatggccagcctgagaacaactacaagacaacccctcctgtgctggacagcgacggctcattcttcctggtgtccaagctgacagtggacaagagcagatggcagcagggcaacgtgttcagctgctctgtgctgcacgaagccctgcacagccactacacccagaagtccctgtctctgagccccggcaagtgataa

SEQ ID NO: 173 - DNA, 1476 bp, synthetic construct
  source 1..1476: mol_type = other DNA
atggactggatctggcgcatcctgtttcttgtgggagccgccacaggcgcccattctcaagttcatctgacacagagcggccctgaagtgcggaagcctggcacaagcgtgaaggtgtcctgtaaagcccctggcaacaccctgaaaacctacgacctgcactgggtccgatctgtgcctggacaaggactgcagtggatgggctggattagccacgagggcgacaagaaagtgatcgtggaacggttcaaggccaaagtgaccatcgactgggacagaagcaccaacaccgcctacctgcagctgagcggactgacatctggcgataccgccgtgtactactgtgccaagggcagcaagcaccggctgagagattacgccctgtacgacgatgacggcgccctgaattgggccgtcgatgtggactacctgagcaacctggaattctggggccagggaacagccgtgacagtgtctagcgcctctacaaagggccctagcgtgttccctctggctcctagcagcaagtcgacatctggcggaacagccgctctgggctgtctggtcaaggactactttcccgagcctgtgacagtgtcctggaactctggcgctctgacaagcggcgtgcacacatttccagccgtgctgcaaagcagcggcctgtactctctgagcagcgtggtcacagtgccaagctctagcctgggcacccagacctacatctgcaatgtgaaccacaagcctagcaacaccaaggtggacaagagagtggaacccaagagctgcgacaagacccacacctgtcctccatgtcctgctccagaactgctcggcggaccttccgtgttcctgtttcctccaaagcctaaggacaccctgatgatcagcagaacccctgaagtgacctgcgtggtggtggatgtgtctcacgaggaccccgaagtgaagttcaattggtacgtggacggcgtggaagtgcacaacgccaagaccaagcctagagaggaacagtacaacagcacctacagagtggtgtccgtgctgacagtgctgcaccaggattggctgaacggcaaagagtacaagtgcaaggtgtccaacaaggccctgcctgctcctatcgagaaaaccatcagcaaggccaagggccagcctagggaaccccaggtttacaccctgcctccatgccgcgaggaaatgaccaagaaccaggtgtccctgtggtgcctcgtgaagggcttctacccttccgatatcgccgtggaatgggagagcaatggccagcctgagaacaactacaagacaacccctcctgtgctggacagcgacggctcattcttcctgtacagcaagctgaccgtggacaagtccagatggcagcagggcaacgtgttcagctgtagcgtgctgcacgaagccctgcacagccactacacccagaagtccctgtctctgagccccggcaagtgataa

SEQ ID NO: 174 - DNA, 1476 bp, synthetic construct
  source 1..1476: mol_type = other DNA
atggattggatttggagaatcctgttcctcgtgggcgccgctaccggagcccactcccaggtgcatctgacgcagtctgggcctgaggtgaggaagcctgggacctccgtaaaggtctcctgcaaggcccctggaaacacattgaagacttatgatctacactgggtgcgcagcgtccctggacaaggccttcagtggatgggatggataagccatgagggcgacaagaaggtcattgtggaaagattcaaggccaaagtcaccattgattgggacaggtccaccaatacggcctatctccaactgagcggcctcacatctggcgacacggccgtctattattgtgcgaaaggctcaaaacacaggctgcgagattacgctctctacgacgacgacggcgcattgaattgggctgtcgatgttgactacctttcgaacttggaattctggggccaagggaccgccgtcaccgtctcttcagcctctacaaagggccctagcgtgttccctctggctcctagcagcaagtcgacatctggcggaacagccgctctgggctgtctggtcaaggactactttcccgagcctgtgacagtgtcctggaactctggcgctctgacaagcggcgtgcacacatttccagccgtgctgcaaagcagcggcctgtactctctgagcagcgtggtcacagtgccaagctctagcctgggcacccagacctacatctgcaatgtgaaccacaagcctagcaacaccaaggtggacaagagagtggaacccaagagctgcgacaagacccacacctgtcctccatgtcctgctccagaactgctggccggaccttccgtgttcctgtttcctccaaagcctaaggacaccctgatgatcagcagaacccctgaagtgacctgcgtggtggtggatgtgtctcacgaggaccccgaagtgaagttcaattggtacgtggacggcgtggaagtgcacaatgccaagaccaagcctagagaggaacagtacaacagcacctacagagtggtgtccgtgctgaccgtgctgcaccaggattggctgaacggcaaagagtacaagtgcaaggtgtccaacaaggccctgcctctgcctgaggaaaagaccatcagcaaggccaagggccagcctagggaaccccaggtttacacactgcctccaagccgcgaggaaatgaccaagaaccaggtgtccctgacctgcctcgtgaagggcttctacccttccgatatcgccgtggaatgggagagcaatggccagcctgagaacaactacaagacaacccctcctgtgctggacagcgacggctcattcttcctgtacagcaagctgaccgtggacaagtccagatggcagcagggcaacgtgttcagctgtagcgtgctgcacgaagccctgcacagccactacacccagaaaagcctgtctctgagccccggcaaatgataa

SEQ ID NO: 175 - DNA, 1476 bp, synthetic construct
  source 1..1476: mol_type = other DNA
atggattggatttggagaatcctgttcctcgtgggcgccgctaccggagcccactcccaggtgcatctgacgcagtctgggcctgaggtgaggaagcctgggacctccgtaaaggtctcctgcaaggcccctggaaacacattgaagacttatgatctacactgggtgcgcagcgtccctggacaaggccttcagtggatgggatggataagccatgagggcgacaagaaggtcattgtggaaagattcaaggccaaagtcaccattgattgggacaggtccaccaatacggcctatctccaactgagcggcctcacatctggcgacacggccgtctattattgtgcgaaaggctcaaaacacaggctgcgagattacgctctctacgacgacgacggcgcattgaattgggctgtcgatgttgactacctttcgaacttggaattctggggccaagggaccgccgtcaccgtctcttcagcctctacaaagggccctagcgtgttccctctggctcctagcagcaagtcgacatctggcggaacagccgctctgggctgtctggtcaaggactactttcccgagcctgtgacagtgtcctggaactctggcgctctgacaagcggcgtgcacacatttccagccgtgctgcaaagcagcggcctgtactctctgagcagcgtggtcacagtgccaagctctagcctgggcacccagacctacatctgcaatgtgaaccacaagcctagcaacaccaaggtggacaagagagtggaacccaagagctgcgacaagacccacacctgtcctccatgtcctgctccagaactgctggccggaccttccgtgttcctgtttcctccaaagcctaaggacaccctgatgatcagcagaacccctgaagtgacctgcgtggtggtggatgtgtctcacgaggaccctgaagtgaagttcaattggtacgtggacggcgtggaagtgcacaacgccaagaccaagcctagagaggaacagtacaacagcacctacagagtggtgtccgtgctgaccgtgctgcaccaggattggctgaacggcaaagagtacaagtgcaaggtgtccaacaaggccctgcctgcccctgaggaaaagaccatcagcaaggccaagggccagcctagggaaccccaggtttacacactgcctccaagccgcgaggaaatgaccaagaaccaggtgtccctgacctgcctcgtgaagggcttctacccttccgatatcgccgtggaatgggagagcaatggccagcctgagaacaactacaagacaacccctcctgtgctggacagcgacggctcattcttcctgtacagcaagctgaccgtggacaagtccagatggcagcagggcaacgtgttcagctgtagcgtgctgcacgaagccctgcacagccactacacccagaaaagcctgtctctgagccccggcaaatgataa

SEQ ID NO: 176 - DNA, 1476 bp, synthetic construct
  source 1..1476: mol_type = other DNA
atggattggatttggagaatcctgttcctcgtgggcgccgctaccggagcccactcccaggtgcatctgacgcagtctgggcctgaggtgaggaagcctgggacctccgtaaaggtctcctgcaaggcccctggaaacacattgaagacttatgatctacactgggtgcgcagcgtccctggacaaggccttcagtggatgggatggataagccatgagggcgacaagaaggtcattgtggaaagattcaaggccaaagtcaccattgattgggacaggtccaccaatacggcctatctccaactgagcggcctcacatctggcgacacggccgtctattattgtgcgaaaggctcaaaacacaggctgcgagattacgctctctacgacgacgacggcgcattgaattgggctgtcgatgttgactacctttcgaacttggaattctggggccaagggaccgccgtcaccgtctcttcagcctctacaaagggccctagcgtgttccctctggctcctagcagcaagtcgacatctggcggaacagccgctctgggctgtctggtcaaggactactttcccgagcctgtgacagtgtcctggaactctggcgctctgacaagcggcgtgcacacatttccagccgtgctgcaaagcagcggcctgtactctctgagcagcgtggtcacagtgccaagctctagcctgggcacccagacctacatctgcaatgtgaaccacaagcctagcaacaccaaggtggacaagagagtggaacccaagagctgcgacaagacccacacctgtcctccatgtcctgctccagaactgctggccggaccttccgtgttcctgtttcctccaaagcctaaggacaccctgatgatcagcagaacccctgaagtgacctgcgtggtggtggatgtgtctcacgaggaccctgaagtgaagttcaattggtacgtggacggcgtggaagtgcacaacgccaagaccaagcctagagaggaacagtacaacagcacctacagagtggtgtccgtgctgaccgtgctgcaccaggattggctgaacggcaaagagtacaagtgcaaggtgtccaacaaggccctgcctgcccctatcgaaaagaccatcagcaaggccaagggccagcctagggaaccccaggtttacacactgcctccaagccgcgaggaaatgaccaagaaccaggtgtccctgacctgcctcgtgaagggcttctacccttccgatatcgccgtggaatgggagagcaatggccagcctgagaacaactacaagacaacccctcctgtgctggacagcgacggctcattcttcctgtacagcaagctgaccgtggacaagtccagatggcagcagggcaacgtgttcagctgtagcgtgctgcacgaagccctgcacagccactacacccagaaaagcctgtctctgagccccggcaaatgataa

SEQ ID NO: 177 - DNA, 1476 bp, synthetic construct
  source 1..1476: mol_type = other DNA
atggattggatttggagaatcctgttcctcgtgggcgccgctaccggagcccactcccaggtgcatctgacgcagtctgggcctgaggtgaggaagcctgggacctccgtaaaggtctcctgcaaggcccctggaaacacattgaagacttatgatctacactgggtgcgcagcgtccctggacaaggccttcagtggatgggatggataagccatgagggcgacaagaaggtcattgtggaaagattcaaggccaaagtcaccattgattgggacaggtccaccaatacggcctatctccaactgagcggcctcacatctggcgacacggccgtctattattgtgcgaaaggctcaaaacacaggctgcgagattacgctctctacgacgacgacggcgcattgaattgggctgtcgatgttgactacctttcgaacttggaattctggggccaagggaccgccgtcaccgtctcttcagcctctacaaagggccctagcgtgttccctctggctcctagcagcaagtcgacatctggcggaacagccgctctgggctgtctggtcaaggactactttcccgagcctgtgacagtgtcctggaactctggcgctctgacaagcggcgtgcacacatttccagccgtgctgcaaagcagcggcctgtactctctgagcagcgtggtcacagtgccaagctctagcctgggcacccagacctacatctgcaatgtgaaccacaagcctagcaacaccaaggtggacaagagagtggaacccaagagctgcgacaagacccacacctgtcctccatgtcctgctccagaactgctgggcggaccttccgtgttcctgtttcctccaaagcctaaggacaccctgatgatcagcagaacccctgaagtgacctgcgtggtggtggatgtgtctcacgaggaccctgaagtgaagttcaattggtacgtggacggcgtggaagtgcacaacgccaagaccaagcctagagaggaacagtacaacagcacctacagagtggtgtccgtgctgaccgtgctgcaccaggattggctgaacggcaaagagtacaagtgcaaggtgtccaacaaggccctgcctgcccctgaggaaaagaccatcagcaaggccaagggccagcctagggaaccccaggtttacacactgcctccaagccgcgaggaaatgaccaagaaccaggtgtccctgacctgcctcgtgaagggcttctacccttccgatatcgccgtggaatgggagagcaatggccagcctgagaacaactacaagacaacccctcctgtgctggacagcgacggctcattcttcctgtacagcaagctgaccgtggacaagtccagatggcagcagggcaacgtgttcagctgtagcgtgctgcacgaagccctgcacagccactacacccagaaaagcctgtctctgagccccggcaaatgataa

SEQ ID NO: 178 - DNA, 1476 bp, synthetic construct
  source 1..1476: mol_type = other DNA
atggattggatttggagaatcctgttcctcgtgggcgccgctaccggagcccactcccaggtgcatctgacgcagtctgggcctgaggtgaggaagcctgggacctccgtaaaggtctcctgcaaggcccctggaaacacattgaagacttatgatctacactgggtgcgcagcgtccctggacaaggccttcagtggatgggatggataagccatgagggcgacaagaaggtcattgtggaaagattcaaggccaaagtcaccattgattgggacaggtccaccaatacggcctatctccaactgagcggcctcacatctggcgacacggccgtctattattgtgcgaaaggctcaaaacacaggctgcgagattacgctctctacgacgacgacggcgcattgaattgggctgtcgatgttgactacctttcgaacttggaattctggggccaagggaccgccgtcaccgtctcttcagcctctacaaagggccctagcgtgttccctctggctcctagcagcaagtcgacatctggcggaacagccgctctgggctgtctggtcaaggactactttcccgagcctgtgacagtgtcctggaactctggcgctctgacaagcggcgtgcacacatttccagccgtgctgcaaagcagcggcctgtactctctgagcagcgtggtcacagtgccaagctctagcctgggcacccagacctacatctgcaatgtgaaccacaagcctagcaacaccaaggtggacaagagagtggaacccaagagctgcgacaagacccacacctgtcctccatgtcctgctccagaactgctggccggaccttccgtgttcctgtttcctccaaagcctaaggacaccctgatgatcagcagaacccctgaagtgacctgcgtggtggtggatgtgtctcacgaggaccccgaagtgaagttcaattggtacgtggacggcgtggaagtgcacaatgccaagaccaagcctagagaggaacagtacaacagcacctacagagtggtgtccgtgctgaccgtgctgcaccaggattggctgaacggcaaagagtacaagtgcaaggtgtccaacaaggccctgcctctgcctgaggaaaagaccatcagcaaggccaagggccagcctagggaaccccaagtctgtacactgcctcctagccgcgaggaaatgaccaagaaccaggtgtccctgagctgcgccgtgaagggcttttacccttccgatatcgccgtggaatgggagagcaatggccagcctgagaacaactacaagacaacccctcctgtgctggacagcgacggctcattcttcctggtgtccaagctgacagtggacaagagcagatggcagcagggcaacgtgttcagctgctctgtgctgcacgaagccctgcacagccactacacccagaagtccctgtctctgagccccggcaagtgataa

SEQ ID NO: 179 - DNA, 1476 bp, synthetic construct
  source 1..1476: mol_type = other DNA
atggattggatttggagaatcctgttcctcgtgggcgccgctaccggagcccactcccaggtgcatctgacgcagtctgggcctgaggtgaggaagcctgggacctccgtaaaggtctcctgcaaggcccctggaaacacattgaagacttatgatctacactgggtgcgcagcgtccctggacaaggccttcagtggatgggatggataagccatgagggcgacaagaaggtcattgtggaaagattcaaggccaaagtcaccattgattgggacaggtccaccaatacggcctatctccaactgagcggcctcacatctggcgacacggccgtctattattgtgcgaaaggctcaaaacacaggctgcgagattacgctctctacgacgacgacggcgcattgaattgggctgtcgatgttgactacctttcgaacttggaattctggggccaagggaccgccgtcaccgtctcttcagcctctacaaagggccctagcgtgttccctctggctcctagcagcaagtcgacatctggcggaacagccgctctgggctgtctggtcaaggactactttcccgagcctgtgacagtgtcctggaactctggcgctctgacaagcggcgtgcacacatttccagccgtgctgcaaagcagcggcctgtactctctgagcagcgtggtcacagtgccaagctctagcctgggcacccagacctacatctgcaatgtgaaccacaagcctagcaacaccaaggtggacaagagagtggaacccaagagctgcgacaagacccacacctgtcctccatgtcctgctccagaactgctggccggaccttccgtgttcctgtttcctccaaagcctaaggacaccctgatgatcagcagaacccctgaagtgacctgcgtggtggtggatgtgtctcacgaggaccctgaagtgaagttcaattggtacgtggacggcgtggaagtgcacaacgccaagaccaagcctagagaggaacagtacaacagcacctacagagtggtgtccgtgctgaccgtgctgcaccaggattggctgaacggcaaagagtacaagtgcaaggtgtccaacaaggccctgcctgcccctgaggaaaagaccatcagcaaggccaagggccagcctagggaaccccaagtctgtacactgcctcctagccgcgaggaaatgaccaagaaccaggtgtccctgagctgcgccgtgaagggcttttacccttccgatatcgccgtggaatgggagagcaatggccagcctgagaacaactacaagacaacccctcctgtgctggacagcgacggctcattcttcctggtgtccaagctgacagtggacaagagcagatggcagcagggcaacgtgttcagctgctctgtgctgcacgaagccctgcacagccactacacccagaagtccctgtctctgagccccggcaagtgataa

SEQ ID NO: 180 - DNA, 1476 bp, synthetic construct
  source 1..1476: mol_type = other DNA
atggattggatttggagaatcctgttcctcgtgggcgccgctaccggagcccactcccaggtgcatctgacgcagtctgggcctgaggtgaggaagcctgggacctccgtaaaggtctcctgcaaggcccctggaaacacattgaagacttatgatctacactgggtgcgcagcgtccctggacaaggccttcagtggatgggatggataagccatgagggcgacaagaaggtcattgtggaaagattcaaggccaaagtcaccattgattgggacaggtccaccaatacggcctatctccaactgagcggcctcacatctggcgacacggccgtctattattgtgcgaaaggctcaaaacacaggctgcgagattacgctctctacgacgacgacggcgcattgaattgggctgtcgatgttgactacctttcgaacttggaattctggggccaagggaccgccgtcaccgtctcttcagcctctacaaagggccctagcgtgttccctctggctcctagcagcaagtcgacatctggcggaacagccgctctgggctgtctggtcaaggactactttcccgagcctgtgacagtgtcctggaactctggcgctctgacaagcggcgtgcacacatttccagccgtgctgcaaagcagcggcctgtactctctgagcagcgtggtcacagtgccaagctctagcctgggcacccagacctacatctgcaatgtgaaccacaagcctagcaacaccaaggtggacaagagagtggaacccaagagctgcgacaagacccacacctgtcctccatgtcctgctccagaactgctggccggaccttccgtgttcctgtttcctccaaagcctaaggacaccctgatgatcagcagaacccctgaagtgacctgcgtggtggtggatgtgtctcacgaggaccctgaagtgaagttcaattggtacgtggacggcgtggaagtgcacaacgccaagaccaagcctagagaggaacagtacaacagcacctacagagtggtgtccgtgctgaccgtgctgcaccaggattggctgaacggcaaagagtacaagtgcaaggtgtccaacaaggccctgcctgcccctatcgaaaagaccatcagcaaggccaagggccagcctagggaaccccaagtctgtacactgcctcctagccgcgaggaaatgaccaagaaccaggtgtccctgagctgcgccgtgaagggcttttacccttccgatatcgccgtggaatgggagagcaatggccagcctgagaacaactacaagacaacccctcctgtgctggacagcgacggctcattcttcctggtgtccaagctgacagtggacaagagcagatggcagcagggcaacgtgttcagctgctctgtgctgcacgaagccctgcacagccactacacccagaagtccctgtctctgagccccggcaagtgataa

SEQ ID NO: 181 - DNA, 1476 bp, synthetic construct
  source 1..1476: mol_type = other DNA
atggattggatttggagaatcctgttcctcgtgggcgccgctaccggagcccactcccaggtgcatctgacgcagtctgggcctgaggtgaggaagcctgggacctccgtaaaggtctcctgcaaggcccctggaaacacattgaagacttatgatctacactgggtgcgcagcgtccctggacaaggccttcagtggatgggatggataagccatgagggcgacaagaaggtcattgtggaaagattcaaggccaaagtcaccattgattgggacaggtccaccaatacggcctatctccaactgagcggcctcacatctggcgacacggccgtctattattgtgcgaaaggctcaaaacacaggctgcgagattacgctctctacgacgacgacggcgcattgaattgggctgtcgatgttgactacctttcgaacttggaattctggggccaagggaccgccgtcaccgtctcttcagcctctacaaagggccctagcgtgttccctctggctcctagcagcaagtcgacatctggcggaacagccgctctgggctgtctggtcaaggactactttcccgagcctgtgacagtgtcctggaactctggcgctctgacaagcggcgtgcacacatttccagccgtgctgcaaagcagcggcctgtactctctgagcagcgtggtcacagtgccaagctctagcctgggcacccagacctacatctgcaatgtgaaccacaagcctagcaacaccaaggtggacaagagagtggaacccaagagctgcgacaagacccacacctgtcctccatgtcctgctccagaactgctgggcggaccttccgtgttcctgtttcctccaaagcctaaggacaccctgatgatcagcagaacccctgaagtgacctgcgtggtggtggatgtgtctcacgaggaccctgaagtgaagttcaattggtacgtggacggcgtggaagtgcacaacgccaagaccaagcctagagaggaacagtacaacagcacctacagagtggtgtccgtgctgaccgtgctgcaccaggattggctgaacggcaaagagtacaagtgcaaggtgtccaacaaggccctgcctgcccctgaggaaaagaccatcagcaaggccaagggccagcctagggaaccccaagtctgtacactgcctcctagccgcgaggaaatgaccaagaaccaggtgtccctgagctgcgccgtgaagggcttttacccttccgatatcgccgtggaatgggagagcaatggccagcctgagaacaactacaagacaacccctcctgtgctggacagcgacggctcattcttcctggtgtccaagctgacagtggacaagagcagatggcagcagggcaacgtgttcagctgctctgtgctgcacgaagccctgcacagccactacacccagaagtccctgtctctgagccccggcaagtgataa

SEQ ID NO: 182 - DNA, 1476 bp, synthetic construct
  source 1..1476: mol_type = other DNA
atggattggatttggagaatcctgttcctcgtgggcgccgctaccggagcccactcccaggtgcatctgacgcagtctgggcctgaggtgaggaagcctgggacctccgtaaaggtctcctgcaaggcccctggaaacacattgaagacttatgatctacactgggtgcgcagcgtccctggacaaggccttcagtggatgggatggataagccatgagggcgacaagaaggtcattgtggaaagattcaaggccaaagtcaccattgattgggacaggtccaccaatacggcctatctccaactgagcggcctcacatctggcgacacggccgtctattattgtgcgaaaggctcaaaacacaggctgcgagattacgctctctacgacgacgacggcgcattgaattgggctgtcgatgttgactacctttcgaacttggaattctggggccaagggaccgccgtcaccgtctcttcagcctctacaaagggccctagcgtgttccctctggctcctagcagcaagtcgacatctggcggaacagccgctctgggctgtctggtcaaggactactttcccgagcctgtgacagtgtcctggaactctggcgctctgacaagcggcgtgcacacatttccagccgtgctgcaaagcagcggcctgtactctctgagcagcgtggtcacagtgccaagctctagcctgggcacccagacctacatctgcaatgtgaaccacaagcctagcaacaccaaggtggacaagagagtggaacccaagagctgcgacaagacccacacctgtcctccatgtcctgctccagaactgctggccggaccttccgtgttcctgtttcctccaaagcctaaggacaccctgatgatcagcagaacccctgaagtgacctgcgtggtggtggatgtgtctcacgaggaccccgaagtgaagttcaattggtacgtggacggcgtggaagtgcacaatgccaagaccaagcctagagaggaacagtacaacagcacctacagagtggtgtccgtgctgaccgtgctgcaccaggattggctgaacggcaaagagtacaagtgcaaggtgtccaacaaggccctgcctctgcctgaggaaaagaccatcagcaaggccaagggccagcctagggaaccccaggtttacaccctgcctccatgccgcgaggaaatgaccaagaaccaggtgtccctgtggtgcctcgtgaagggcttctacccttccgatatcgccgtggaatgggagagcaatggccagcctgagaacaactacaagacaacccctcctgtgctggacagcgacggctcattcttcctgtacagcaagctgaccgtggacaagtccagatggcagcagggcaacgtgttcagctgtagcgtgctgcacgaagccctgcacagccactacacccagaagtccctgtctctgagccccggcaagtgataa

SEQ ID NO: 183 - DNA, 1476 bp, synthetic construct
  source 1..1476: mol_type = other DNA
atggattggatttggagaatcctgttcctcgtgggcgccgctaccggagcccactcccaggtgcatctgacgcagtctgggcctgaggtgaggaagcctgggacctccgtaaaggtctcctgcaaggcccctggaaacacattgaagacttatgatctacactgggtgcgcagcgtccctggacaaggccttcagtggatgggatggataagccatgagggcgacaagaaggtcattgtggaaagattcaaggccaaagtcaccattgattgggacaggtccaccaatacggcctatctccaactgagcggcctcacatctggcgacacggccgtctattattgtgcgaaaggctcaaaacacaggctgcgagattacgctctctacgacgacgacggcgcattgaattgggctgtcgatgttgactacctttcgaacttggaattctggggccaagggaccgccgtcaccgtctcttcagcctctacaaagggccctagcgtgttccctctggctcctagcagcaagtcgacatctggcggaacagccgctctgggctgtctggtcaaggactactttcccgagcctgtgacagtgtcctggaactctggcgctctgacaagcggcgtgcacacatttccagccgtgctgcaaagcagcggcctgtactctctgagcagcgtggtcacagtgccaagctctagcctgggcacccagacctacatctgcaatgtgaaccacaagcctagcaacaccaaggtggacaagagagtggaacccaagagctgcgacaagacccacacctgtcctccatgtcctgctccagaactgctggccggaccttccgtgttcctgtttcctccaaagcctaaggacaccctgatgatcagcagaacccctgaagtgacctgcgtggtggtggatgtgtctcacgaggaccctgaagtgaagttcaattggtacgtggacggcgtggaagtgcacaacgccaagaccaagcctagagaggaacagtacaacagcacctacagagtggtgtccgtgctgaccgtgctgcaccaggattggctgaacggcaaagagtacaagtgcaaggtgtccaacaaggccctgcctgcccctgaggaaaagaccatcagcaaggccaagggccagcctagggaaccccaggtttacaccctgcctccatgccgcgaggaaatgaccaagaaccaggtgtccctgtggtgcctcgtgaagggcttctacccttccgatatcgccgtggaatgggagagcaatggccagcctgagaacaactacaagacaacccctcctgtgctggacagcgacggctcattcttcctgtacagcaagctgaccgtggacaagtccagatggcagcagggcaacgtgttcagctgtagcgtgctgcacgaagccctgcacagccactacacccagaagtccctgtctctgagccccggcaagtgataa

SEQ ID NO: 184 - DNA, 1476 bp, synthetic construct
  source 1..1476: mol_type = other DNA
atggattggatttggagaatcctgttcctcgtgggcgccgctaccggagcccactcccaggtgcatctgacgcagtctgggcctgaggtgaggaagcctgggacctccgtaaaggtctcctgcaaggcccctggaaacacattgaagacttatgatctacactgggtgcgcagcgtccctggacaaggccttcagtggatgggatggataagccatgagggcgacaagaaggtcattgtggaaagattcaaggccaaagtcaccattgattgggacaggtccaccaatacggcctatctccaactgagcggcctcacatctggcgacacggccgtctattattgtgcgaaaggctcaaaacacaggctgcgagattacgctctctacgacgacgacggcgcattgaattgggctgtcgatgttgactacctttcgaacttggaattctggggccaagggaccgccgtcaccgtctcttcagcctctacaaagggccctagcgtgttccctctggctcctagcagcaagtcgacatctggcggaacagccgctctgggctgtctggtcaaggactactttcccgagcctgtgacagtgtcctggaactctggcgctctgacaagcggcgtgcacacatttccagccgtgctgcaaagcagcggcctgtactctctgagcagcgtggtcacagtgccaagctctagcctgggcacccagacctacatctgcaatgtgaaccacaagcctagcaacaccaaggtggacaagagagtggaacccaagagctgcgacaagacccacacctgtcctccatgtcctgctccagaactgctggccggaccttccgtgttcctgtttcctccaaagcctaaggacaccctgatgatcagcagaacccctgaagtgacctgcgtggtggtggatgtgtctcacgaggaccctgaagtgaagttcaattggtacgtggacggcgtggaagtgcacaacgccaagaccaagcctagagaggaacagtacaacagcacctacagagtggtgtccgtgctgaccgtgctgcaccaggattggctgaacggcaaagagtacaagtgcaaggtgtccaacaaggccctgcctgcccctatcgaaaagaccatcagcaaggccaagggccagcctagggaaccccaggtttacaccctgcctccatgccgcgaggaaatgaccaagaaccaggtgtccctgtggtgcctcgtgaagggcttctacccttccgatatcgccgtggaatgggagagcaatggccagcctgagaacaactacaagacaacccctcctgtgctggacagcgacggctcattcttcctgtacagcaagctgaccgtggacaagtccagatggcagcagggcaacgtgttcagctgtagcgtgctgcacgaagccctgcacagccactacacccagaagtccctgtctctgagccccggcaagtgataa

SEQ ID NO: 185 - DNA, 1476 bp, synthetic construct
  source 1..1476: mol_type = other DNA
atggattggatttggagaatcctgttcctcgtgggcgccgctaccggagcccactcccaggtgcatctgacgcagtctgggcctgaggtgaggaagcctgggacctccgtaaaggtctcctgcaaggcccctggaaacacattgaagacttatgatctacactgggtgcgcagcgtccctggacaaggccttcagtggatgggatggataagccatgagggcgacaagaaggtcattgtggaaagattcaaggccaaagtcaccattgattgggacaggtccaccaatacggcctatctccaactgagcggcctcacatctggcgacacggccgtctattattgtgcgaaaggctcaaaacacaggctgcgagattacgctctctacgacgacgacggcgcattgaattgggctgtcgatgttgactacctttcgaacttggaattctggggccaagggaccgccgtcaccgtctcttcagcctctacaaagggccctagcgtgttccctctggctcctagcagcaagtcgacatctggcggaacagccgctctgggctgtctggtcaaggactactttcccgagcctgtgacagtgtcctggaactctggcgctctgacaagcggcgtgcacacatttccagccgtgctgcaaagcagcggcctgtactctctgagcagcgtggtcacagtgccaagctctagcctgggcacccagacctacatctgcaatgtgaaccacaagcctagcaacaccaaggtggacaagagagtggaacccaagagctgcgacaagacccacacctgtcctccatgtcctgctccagaactgctgggcggaccttccgtgttcctgtttcctccaaagcctaaggacaccctgatgatcagcagaacccctgaagtgacctgcgtggtggtggatgtgtctcacgaggaccctgaagtgaagttcaattggtacgtggacggcgtggaagtgcacaacgccaagaccaagcctagagaggaacagtacaacagcacctacagagtggtgtccgtgctgaccgtgctgcaccaggattggctgaacggcaaagagtacaagtgcaaggtgtccaacaaggccctgcctgcccctgaggaaaagaccatcagcaaggccaagggccagcctagggaaccccaggtttacaccctgcctccatgccgcgaggaaatgaccaagaaccaggtgtccctgtggtgcctcgtgaagggcttctacccttccgatatcgccgtggaatgggagagcaatggccagcctgagaacaactacaagacaacccctcctgtgctggacagcgacggctcattcttcctgtacagcaagctgaccgtggacaagtccagatggcagcagggcaacgtgttcagctgtagcgtgctgcacgaagccctgcacagccactacacccagaagtccctgtctctgagccccggcaagtgataa

SEQ ID NO: 186 - DNA, 1476 bp, synthetic construct
  source 1..1476: mol_type = other DNA
atggattggatttggagaatcctgttcctcgtgggcgccgctaccggagcccactcccaggtgcatctgacgcagtctgggcctgaggtgaggaagcctgggacctccgtaaaggtctcctgcaaggcccctggaaacacattgaagacttatgatctacactgggtgcgcagcgtccctggacaaggccttcagtggatgggatggataagccatgagggcgacaagaaggtcattgtggaaagattcaaggccaaagtcaccattgattgggacaggtccaccaatacggcctatctccaactgagcggcctcacatctggcgacacggccgtctattattgtgcgaaaggctcaaaacacaggctgcgagattacgctctctacgacgacgacggcgcattgaattgggctgtcgatgttgactacctttcgaacttggaattctggggccaagggaccgccgtcaccgtctcttcagcctctacaaagggccctagcgtgttccctctggctcctagcagcaagtcgacatctggcggaacagccgctctgggctgtctggtcaaggactactttcccgagcctgtgacagtgtcctggaactctggcgctctgacaagcggcgtgcacacatttccagccgtgctgcaaagcagcggcctgtactctctgagcagcgtggtcacagtgccaagctctagcctgggcacccagacctacatctgcaatgtgaaccacaagcctagcaacaccaaggtggacaagaaggtggaacccaagagctgcgacaagacccacacctgtcctccatgtcctgctccagaactgctcggcggaccttccgtgttcctgtttcctccaaagcctaaggacaccctgatgatcagcagaacccctgaagtgacctgcgtggtggtggatgtgtctcacgaggaccccgaagtgaagttcaattggtacgtggacggcgtggaagtgcacaacgccaagaccaagcctagagaggaacagtacaacagcacctacagagtggtgtccgtgctgacagtgctgcaccaggattggctgaacggcaaagagtacaagtgcaaggtgtccaacaaggccctgcctgctcctatcgagaaaaccatcagcaaggccaagggccagcctagggaaccccaggtttacacactgcctccaagccgcgaggaaatgaccaagaaccaggtgtccctgacctgcctcgtgaagggcttctacccttccgatatcgccgtggaatgggagagcaatggccagcctgagaacaactacaagacaacccctcctgtgctggacagcgacggctcattcttcctgtacagcaagctgactgtggataagtcccggtggcagcagggcaacgtgttcagctgttctgtgatgcacgaagccctgcacaaccactacacccagaaaagcctgtctctgagccccggcaagtgataa

SEQ ID NO: 187 - DNA, 1476 bp, synthetic construct
  source 1..1476: mol_type = other DNA
atggattggatttggagaatcctgttcctcgtgggcgccgctaccggagcccactcccaggtgcatctgacgcagtctgggcctgaggtgaggaagcctgggacctccgtaaaggtctcctgcaaggcccctggaaacacattgaagacttatgatctacactgggtgcgcagcgtccctggacaaggccttcagtggatgggatggataagccatgagggcgacaagaaggtcattgtggaaagattcaaggccaaagtcaccattgattgggacaggtccaccaatacggcctatctccaactgagcggcctcacatctggcgacacggccgtctattattgtgcgaaaggctcaaaacacaggctgcgagattacgctctctacgacgacgacggcgcattgaattgggctgtcgatgttgactacctttcgaacttggaattctggggccaagggaccgccgtcaccgtctcttcagcctctacaaagggccctagcgtgttccctctggctcctagcagcaagtcgacatctggcggaacagccgctctgggctgtctggtcaaggactactttcccgagcctgtgacagtgtcctggaactctggcgctctgacaagcggcgtgcacacatttccagccgtgctgcaaagcagcggcctgtactctctgagcagcgtggtcacagtgccaagctctagcctgggcacccagacctacatctgcaatgtgaaccacaagcctagcaacaccaaggtggacaagaaggtggaacccaagagctgcgacaagacccacacctgtcctccatgtcctgctccagaactgctcggcggaccttccgtgttcctgtttcctccaaagcctaaggacaccctgatgatcagcagaacccctgaagtgacctgcgtggtggtggatgtgtctcacgaggaccccgaagtgaagttcaattggtacgtggacggcgtggaagtgcacaacgccaagaccaagcctagagaggaacagtacaacagcacctacagagtggtgtccgtgctgacagtgctgcaccaggattggctgaacggcaaagagtacaagtgcaaggtgtccaacaaggccctgcctgctcctatcgagaaaaccatcagcaaggccaagggccagcctagggaaccccaggtttacacactgcctccaagccgcgaggaaatgaccaagaaccaggtgtccctgacctgcctcgtgaagggcttctacccttccgatatcgccgtggaatgggagagcaatggccagcctgagaacaactacaagacaacccctcctgtgctggacagcgacggctcattcttcctgtacagcaagctgaccgtggacaagtccagatggcagcagggcaacgtgttcagctgtagcgtgctgcacgaagccctgcacagccactacacccagaaaagcctgtctctgagccccggcaaatgataa

SEQ ID NO: 188 - DNA, 1476 bp, synthetic construct
  source 1..1476: mol_type = other DNA
atggattggatttggagaatcctgttcctcgtgggcgccgctaccggagcccactcccaggtgcatctgacgcagtctgggcctgaggtgaggaagcctgggacctccgtaaaggtctcctgcaaggcccctggaaacacattgaagacttatgatctacactgggtgcgcagcgtccctggacaaggccttcagtggatgggatggataagccatgagggcgacaagaaggtcattgtggaaagattcaaggccaaagtcaccattgattgggacaggtccaccaatacggcctatctccaactgagcggcctcacatctggcgacacggccgtctattattgtgcgaaaggctcaaaacacaggctgcgagattacgctctctacgacgacgacggcgcattgaattgggctgtcgatgttgactacctttcgaacttggaattctggggccaagggaccgccgtcaccgtctcttcagcctctacaaagggccctagcgtgttccctctggctcctagcagcaagtcgacatctggcggaacagccgctctgggctgtctggtcaaggactactttcccgagcctgtgacagtgtcctggaactctggcgctctgacaagcggcgtgcacacatttccagccgtgctgcaaagcagcggcctgtactctctgagcagcgtggtcacagtgccaagctctagcctgggcacccagacctacatctgcaatgtgaaccacaagcctagcaacaccaaggtggacaagaaggtggaacccaagagctgcgacaagacccacacctgtcctccatgtcctgctccagaactgctcggcggaccttccgtgttcctgtttcctccaaagcctaaggacaccctgatgatcagcagaacccctgaagtgacctgcgtggtggtggatgtgtctcacgaggaccccgaagtgaagttcaattggtacgtggacggcgtggaagtgcacaacgccaagaccaagcctagagaggaacagtacaacagcacctacagagtggtgtccgtgctgacagtgctgcaccaggattggctgaacggcaaagagtacaagtgcaaggtgtccaacaaggccctgcctgctcctatcgagaaaaccatcagcaaggccaagggccagcctagggaaccccaagtctgtacactgcctcctagccgcgaggaaatgaccaagaaccaggtgtccctgagctgcgccgtgaagggcttttacccttccgatatcgccgtggaatgggagagcaatggccagcctgagaacaactacaagacaacccctcctgtgctggacagcgacggctcattcttcctggtgtccaagctgacagtggacaagagcagatggcagcagggcaacgtgttcagctgctctgtgctgcacgaagccctgcacagccactacacccagaagtccctgtctctgagccccggcaagtgataa

SEQ ID NO: 189 - DNA, 1476 bp, synthetic construct
  source 1..1476: mol_type = other DNA
atggattggatttggagaatcctgttcctcgtgggcgccgctaccggagcccactcccaggtgcatctgacgcagtctgggcctgaggtgaggaagcctgggacctccgtaaaggtctcctgcaaggcccctggaaacacattgaagacttatgatctacactgggtgcgcagcgtccctggacaaggccttcagtggatgggatggataagccatgagggcgacaagaaggtcattgtggaaagattcaaggccaaagtcaccattgattgggacaggtccaccaatacggcctatctccaactgagcggcctcacatctggcgacacggccgtctattattgtgcgaaaggctcaaaacacaggctgcgagattacgctctctacgacgacgacggcgcattgaattgggctgtcgatgttgactacctttcgaacttggaattctggggccaagggaccgccgtcaccgtctcttcagcctctacaaagggccctagcgtgttccctctggctcctagcagcaagtcgacatctggcggaacagccgctctgggctgtctggtcaaggactactttcccgagcctgtgacagtgtcctggaactctggcgctctgacaagcggcgtgcacacatttccagccgtgctgcaaagcagcggcctgtactctctgagcagcgtggtcacagtgccaagctctagcctgggcacccagacctacatctgcaatgtgaaccacaagcctagcaacaccaaggtggacaagaaggtggaacccaagagctgcgacaagacccacacctgtcctccatgtcctgctccagaactgctcggcggaccttccgtgttcctgtttcctccaaagcctaaggacaccctgatgatcagcagaacccctgaagtgacctgcgtggtggtggatgtgtctcacgaggaccccgaagtgaagttcaattggtacgtggacggcgtggaagtgcacaacgccaagaccaagcctagagaggaacagtacaacagcacctacagagtggtgtccgtgctgacagtgctgcaccaggattggctgaacggcaaagagtacaagtgcaaggtgtccaacaaggccctgcctgctcctatcgagaaaaccatcagcaaggccaagggccagcctagggaaccccaggtttacaccctgcctccatgccgcgaggaaatgaccaagaaccaggtgtccctgtggtgcctcgtgaagggcttctacccttccgatatcgccgtggaatgggagagcaatggccagcctgagaacaactacaagacaacccctcctgtgctggacagcgacggctcattcttcctgtacagcaagctgaccgtggacaagtccagatggcagcagggcaacgtgttcagctgtagcgtgctgcacgaagccctgcacagccactacacccagaagtccctgtctctgagccccggcaagtgataa

SEQ ID NO: 190 - DNA, 1476 bp, synthetic construct
  source 1..1476: mol_type = other DNA
atggattggatttggagaatcctgttcctcgtgggcgccgctaccggagcccactcccaggtgcatctgacgcagtctgggcctgaggtgaggaagcctgggacctccgtaaaggtctcctgcaaggcccctggaaacacattgaagacttatgatctacactgggtgcgcagcgtccctggacaaggccttcagtggatgggatggataagccatgagggcgacaagaaggtcattgtggaaagattcaaggccaaagtcaccattgattgggacaggtccaccaatacggcctatctccaactgagcggcctcacatctggcgacacggccgtctattattgtgcgaaaggctcaaaacacaggctgcgagattacgctctctacgacgacgacggcgcattgaattgggctgtcgatgttgactacctttcgaacttggaattctggggccaagggaccgccgtcaccgtctcttcagcctctacaaagggccctagcgtgttccctctggctcctagcagcaagtcgacatctggcggaacagccgctctgggctgtctggtcaaggactactttcccgagcctgtgacagtgtcctggaactctggcgctctgacaagcggcgtgcacacatttccagccgtgctgcaaagcagcggcctgtactctctgagcagcgtggtcacagtgccaagctctagcctgggcacccagacctacatctgcaatgtgaaccacaagcctagcaacaccaaggtggacaagaaggtggaacccaagagctgcgacaagacccacacctgtcctccatgtcctgctccagaactgctggccggaccttccgtgttcctgtttcctccaaagcctaaggacaccctgatgatcagcagaacccctgaagtgacctgcgtggtggtggatgtgtctcacgaggaccccgaagtgaagttcaattggtacgtggacggcgtggaagtgcacaatgccaagaccaagcctagagaggaacagtacaacagcacctacagagtggtgtccgtgctgaccgtgctgcaccaggattggctgaacggcaaagagtacaagtgcaaggtgtccaacaaggccctgcctctgcctgaggaaaagaccatcagcaaggccaagggccagcctagggaaccccaggtttacacactgcctccaagccgcgaggaaatgaccaagaaccaggtgtccctgacctgcctcgtgaagggcttctacccttccgatatcgccgtggaatgggagagcaatggccagcctgagaacaactacaagacaacccctcctgtgctggacagcgacggctcattcttcctgtacagcaagctgaccgtggacaagtccagatggcagcagggcaacgtgttcagctgtagcgtgctgcacgaagccctgcacagccactacacccagaaaagcctgtctctgagccccggcaaatgataa

SEQ ID NO: 191 - DNA, 1476 bp, synthetic construct
  source 1..1476: mol_type = other DNA
atggattggatttggagaatcctgttcctcgtgggcgccgctaccggagcccactcccaggtgcatctgacgcagtctgggcctgaggtgaggaagcctgggacctccgtaaaggtctcctgcaaggcccctggaaacacattgaagacttatgatctacactgggtgcgcagcgtccctggacaaggccttcagtggatgggatggataagccatgagggcgacaagaaggtcattgtggaaagattcaaggccaaagtcaccattgattgggacaggtccaccaatacggcctatctccaactgagcggcctcacatctggcgacacggccgtctattattgtgcgaaaggctcaaaacacaggctgcgagattacgctctctacgacgacgacggcgcattgaattgggctgtcgatgttgactacctttcgaacttggaattctggggccaagggaccgccgtcaccgtctcttcagcctctacaaagggccctagcgtgttccctctggctcctagcagcaagtcgacatctggcggaacagccgctctgggctgtctggtcaaggactactttcccgagcctgtgacagtgtcctggaactctggcgctctgacaagcggcgtgcacacatttccagccgtgctgcaaagcagcggcctgtactctctgagcagcgtggtcacagtgccaagctctagcctgggcacccagacctacatctgcaatgtgaaccacaagcctagcaacaccaaggtggacaagaaggtggaacccaagagctgcgacaagacccacacctgtcctccatgtcctgctccagaactgctggccggaccttccgtgttcctgtttcctccaaagcctaaggacaccctgatgatcagcagaacccctgaagtgacctgcgtggtggtggatgtgtctcacgaggaccctgaagtgaagttcaattggtacgtggacggcgtggaagtgcacaacgccaagaccaagcctagagaggaacagtacaacagcacctacagagtggtgtccgtgctgaccgtgctgcaccaggattggctgaacggcaaagagtacaagtgcaaggtgtccaacaaggccctgcctgcccctgaggaaaagaccatcagcaaggccaagggccagcctagggaaccccaggtttacacactgcctccaagccgcgaggaaatgaccaagaaccaggtgtccctgacctgcctcgtgaagggcttctacccttccgatatcgccgtggaatgggagagcaatggccagcctgagaacaactacaagacaacccctcctgtgctggacagcgacggctcattcttcctgtacagcaagctgaccgtggacaagtccagatggcagcagggcaacgtgttcagctgtagcgtgctgcacgaagccctgcacagccactacacccagaaaagcctgtctctgagccccggcaaatgataa

SEQ ID NO: 192 - DNA, 1476 bp, synthetic construct
  source 1..1476: mol_type = other DNA
atggattggatttggagaatcctgttcctcgtgggcgccgctaccggagcccactcccaggtgcatctgacgcagtctgggcctgaggtgaggaagcctgggacctccgtaaaggtctcctgcaaggcccctggaaacacattgaagacttatgatctacactgggtgcgcagcgtccctggacaaggccttcagtggatgggatggataagccatgagggcgacaagaaggtcattgtggaaagattcaaggccaaagtcaccattgattgggacaggtccaccaatacggcctatctccaactgagcggcctcacatctggcgacacggccgtctattattgtgcgaaaggctcaaaacacaggctgcgagattacgctctctacgacgacgacggcgcattgaattgggctgtcgatgttgactacctttcgaacttggaattctggggccaagggaccgccgtcaccgtctcttcagcctctacaaagggccctagcgtgttccctctggctcctagcagcaagtcgacatctggcggaacagccgctctgggctgtctggtcaaggactactttcccgagcctgtgacagtgtcctggaactctggcgctctgacaagcggcgtgcacacatttccagccgtgctgcaaagcagcggcctgtactctctgagcagcgtggtcacagtgccaagctctagcctgggcacccagacctacatctgcaatgtgaaccacaagcctagcaacaccaaggtggacaagaaggtggaacccaagagctgcgacaagacccacacctgtcctccatgtcctgctccagaactgctggccggaccttccgtgttcctgtttcctccaaagcctaaggacaccctgatgatcagcagaacccctgaagtgacctgcgtggtggtggatgtgtctcacgaggaccctgaagtgaagttcaattggtacgtggacggcgtggaagtgcacaacgccaagaccaagcctagagaggaacagtacaacagcacctacagagtggtgtccgtgctgaccgtgctgcaccaggattggctgaacggcaaagagtacaagtgcaaggtgtccaacaaggccctgcctgcccctatcgaaaagaccatcagcaaggccaagggccagcctagggaaccccaggtttacacactgcctccaagccgcgaggaaatgaccaagaaccaggtgtccctgacctgcctcgtgaagggcttctacccttccgatatcgccgtggaatgggagagcaatggccagcctgagaacaactacaagacaacccctcctgtgctggacagcgacggctcattcttcctgtacagcaagctgaccgtggacaagtccagatggcagcagggcaacgtgttcagctgtagcgtgctgcacgaagccctgcacagccactacacccagaaaagcctgtctctgagccccggcaaatgataa

SEQ ID NO: 193 - DNA, 1476 bp, synthetic construct
  source 1..1476: mol_type = other DNA
atggattggatttggagaatcctgttcctcgtgggcgccgctaccggagcccactcccaggtgcatctgacgcagtctgggcctgaggtgaggaagcctgggacctccgtaaaggtctcctgcaaggcccctggaaacacattgaagacttatgatctacactgggtgcgcagcgtccctggacaaggccttcagtggatgggatggataagccatgagggcgacaagaaggtcattgtggaaagattcaaggccaaagtcaccattgattgggacaggtccaccaatacggcctatctccaactgagcggcctcacatctggcgacacggccgtctattattgtgcgaaaggctcaaaacacaggctgcgagattacgctctctacgacgacgacggcgcattgaattgggctgtcgatgttgactacctttcgaacttggaattctggggccaagggaccgccgtcaccgtctcttcagcctctacaaagggccctagcgtgttccctctggctcctagcagcaagtcgacatctggcggaacagccgctctgggctgtctggtcaaggactactttcccgagcctgtgacagtgtcctggaactctggcgctctgacaagcggcgtgcacacatttccagccgtgctgcaaagcagcggcctgtactctctgagcagcgtggtcacagtgccaagctctagcctgggcacccagacctacatctgcaatgtgaaccacaagcctagcaacaccaaggtggacaagaaggtggaacccaagagctgcgacaagacccacacctgtcctccatgtcctgctccagaactgctgggcggaccttccgtgttcctgtttcctccaaagcctaaggacaccctgatgatcagcagaacccctgaagtgacctgcgtggtggtggatgtgtctcacgaggaccctgaagtgaagttcaattggtacgtggacggcgtggaagtgcacaacgccaagaccaagcctagagaggaacagtacaacagcacctacagagtggtgtccgtgctgaccgtgctgcaccaggattggctgaacggcaaagagtacaagtgcaaggtgtccaacaaggccctgcctgcccctgaggaaaagaccatcagcaaggccaagggccagcctagggaaccccaggtttacacactgcctccaagccgcgaggaaatgaccaagaaccaggtgtccctgacctgcctcgtgaagggcttctacccttccgatatcgccgtggaatgggagagcaatggccagcctgagaacaactacaagacaacccctcctgtgctggacagcgacggctcattcttcctgtacagcaagctgaccgtggacaagtccagatggcagcagggcaacgtgttcagctgtagcgtgctgcacgaagccctgcacagccactacacccagaaaagcctgtctctgagccccggcaaatgataa

SEQ ID NO: 194 - DNA, 1476 bp, synthetic construct
  source 1..1476: mol_type = other DNA
atggattggatttggagaatcctgttcctcgtgggcgccgctaccggagcccactcccaggtgcatctgacgcagtctgggcctgaggtgaggaagcctgggacctccgtaaaggtctcctgcaaggcccctggaaacacattgaagacttatgatctacactgggtgcgcagcgtccctggacaaggccttcagtggatgggatggataagccatgagggcgacaagaaggtcattgtggaaagattcaaggccaaagtcaccattgattgggacaggtccaccaatacggcctatctccaactgagcggcctcacatctggcgacacggccgtctattattgtgcgaaaggctcaaaacacaggctgcgagattacgctctctacgacgacgacggcgcattgaattgggctgtcgatgttgactacctttcgaacttggaattctggggccaagggaccgccgtcaccgtctcttcagcctctacaaagggccctagcgtgttccctctggctcctagcagcaagtcgacatctggcggaacagccgctctgggctgtctggtcaaggactactttcccgagcctgtgacagtgtcctggaactctggcgctctgacaagcggcgtgcacacatttccagccgtgctgcaaagcagcggcctgtactctctgagcagcgtggtcacagtgccaagctctagcctgggcacccagacctacatctgcaatgtgaaccacaagcctagcaacaccaaggtggacaagaaggtggaacccaagagctgcgacaagacccacacctgtcctccatgtcctgctccagaactgctggccggaccttccgtgttcctgtttcctccaaagcctaaggacaccctgatgatcagcagaacccctgaagtgacctgcgtggtggtggatgtgtctcacgaggaccccgaagtgaagttcaattggtacgtggacggcgtggaagtgcacaatgccaagaccaagcctagagaggaacagtacaacagcacctacagagtggtgtccgtgctgaccgtgctgcaccaggattggctgaacggcaaagagtacaagtgcaaggtgtccaacaaggccctgcctctgcctgaggaaaagaccatcagcaaggccaagggccagcctagggaaccccaagtctgtacactgcctcctagccgcgaggaaatgaccaagaaccaggtgtccctgagctgcgccgtgaagggcttttacccttccgatatcgccgtggaatgggagagcaatggccagcctgagaacaactacaagacaacccctcctgtgctggacagcgacggctcattcttcctggtgtccaagctgacagtggacaagagcagatggcagcagggcaacgtgttcagctgctctgtgctgcacgaagccctgcacagccactacacccagaagtccctgtctctgagccccggcaagtgataa

SEQ ID NO: 195 - DNA, 1476 bp, synthetic construct
  source 1..1476: mol_type = other DNA
atggattggatttggagaatcctgttcctcgtgggcgccgctaccggagcccactcccaggtgcatctgacgcagtctgggcctgaggtgaggaagcctgggacctccgtaaaggtctcctgcaaggcccctggaaacacattgaagacttatgatctacactgggtgcgcagcgtccctggacaaggccttcagtggatgggatggataagccatgagggcgacaagaaggtcattgtggaaagattcaaggccaaagtcaccattgattgggacaggtccaccaatacggcctatctccaactgagcggcctcacatctggcgacacggccgtctattattgtgcgaaaggctcaaaacacaggctgcgagattacgctctctacgacgacgacggcgcattgaattgggctgtcgatgttgactacctttcgaacttggaattctggggccaagggaccgccgtcaccgtctcttcagcctctacaaagggccctagcgtgttccctctggctcctagcagcaagtcgacatctggcggaacagccgctctgggctgtctggtcaaggactactttcccgagcctgtgacagtgtcctggaactctggcgctctgacaagcggcgtgcacacatttccagccgtgctgcaaagcagcggcctgtactctctgagcagcgtggtcacagtgccaagctctagcctgggcacccagacctacatctgcaatgtgaaccacaagcctagcaacaccaaggtggacaagaaggtggaacccaagagctgcgacaagacccacacctgtcctccatgtcctgctccagaactgctggccggaccttccgtgttcctgtttcctccaaagcctaaggacaccctgatgatcagcagaacccctgaagtgacctgcgtggtggtggatgtgtctcacgaggaccctgaagtgaagttcaattggtacgtggacggcgtggaagtgcacaacgccaagaccaagcctagagaggaacagtacaacagcacctacagagtggtgtccgtgctgaccgtgctgcaccaggattggctgaacggcaaagagtacaagtgcaaggtgtccaacaaggccctgcctgcccctgaggaaaagaccatcagcaaggccaagggccagcctagggaaccccaagtctgtacactgcctcctagccgcgaggaaatgaccaagaaccaggtgtccctgagctgcgccgtgaagggcttttacccttccgatatcgccgtggaatgggagagcaatggccagcctgagaacaactacaagacaacccctcctgtgctggacagcgacggctcattcttcctggtgtccaagctgacagtggacaagagcagatggcagcagggcaacgtgttcagctgctctgtgctgcacgaagccctgcacagccactacacccagaagtccctgtctctgagccccggcaagtgataa

SEQ ID NO: 196 - DNA, 1476 bp, synthetic construct
  source 1..1476: mol_type = other DNA
atggattggatttggagaatcctgttcctcgtgggcgccgctaccggagcccactcccaggtgcatctgacgcagtctgggcctgaggtgaggaagcctgggacctccgtaaaggtctcctgcaaggcccctggaaacacattgaagacttatgatctacactgggtgcgcagcgtccctggacaaggccttcagtggatgggatggataagccatgagggcgacaagaaggtcattgtggaaagattcaaggccaaagtcaccattgattgggacaggtccaccaatacggcctatctccaactgagcggcctcacatctggcgacacggccgtctattattgtgcgaaaggctcaaaacacaggctgcgagattacgctctctacgacgacgacggcgcattgaattgggctgtcgatgttgactacctttcgaacttggaattctggggccaagggaccgccgtcaccgtctcttcagcctctacaaagggccctagcgtgttccctctggctcctagcagcaagtcgacatctggcggaacagccgctctgggctgtctggtcaaggactactttcccgagcctgtgacagtgtcctggaactctggcgctctgacaagcggcgtgcacacatttccagccgtgctgcaaagcagcggcctgtactctctgagcagcgtggtcacagtgccaagctctagcctgggcacccagacctacatctgcaatgtgaaccacaagcctagcaacaccaaggtggacaagaaggtggaacccaagagctgcgacaagacccacacctgtcctccatgtcctgctccagaactgctggccggaccttccgtgttcctgtttcctccaaagcctaaggacaccctgatgatcagcagaacccctgaagtgacctgcgtggtggtggatgtgtctcacgaggaccctgaagtgaagttcaattggtacgtggacggcgtggaagtgcacaacgccaagaccaagcctagagaggaacagtacaacagcacctacagagtggtgtccgtgctgaccgtgctgcaccaggattggctgaacggcaaagagtacaagtgcaaggtgtccaacaaggccctgcctgcccctatcgaaaagaccatcagcaaggccaagggccagcctagggaaccccaagtctgtacactgcctcctagccgcgaggaaatgaccaagaaccaggtgtccctgagctgcgccgtgaagggcttttacccttccgatatcgccgtggaatgggagagcaatggccagcctgagaacaactacaagacaacccctcctgtgctggacagcgacggctcattcttcctggtgtccaagctgacagtggacaagagcagatggcagcagggcaacgtgttcagctgctctgtgctgcacgaagccctgcacagccactacacccagaagtccctgtctctgagccccggcaagtgataa

SEQ ID NO: 197 - DNA, 1476 bp, synthetic construct
  source 1..1476: mol_type = other DNA
atggattggatttggagaatcctgttcctcgtgggcgccgctaccggagcccactcccaggtgcatctgacgcagtctgggcctgaggtgaggaagcctgggacctccgtaaaggtctcctgcaaggcccctggaaacacattgaagacttatgatctacactgggtgcgcagcgtccctggacaaggccttcagtggatgggatggataagccatgagggcgacaagaaggtcattgtggaaagattcaaggccaaagtcaccattgattgggacaggtccaccaatacggcctatctccaactgagcggcctcacatctggcgacacggccgtctattattgtgcgaaaggctcaaaacacaggctgcgagattacgctctctacgacgacgacggcgcattgaattgggctgtcgatgttgactacctttcgaacttggaattctggggccaagggaccgccgtcaccgtctcttcagcctctacaaagggccctagcgtgttccctctggctcctagcagcaagtcgacatctggcggaacagccgctctgggctgtctggtcaaggactactttcccgagcctgtgacagtgtcctggaactctggcgctctgacaagcggcgtgcacacatttccagccgtgctgcaaagcagcggcctgtactctctgagcagcgtggtcacagtgccaagctctagcctgggcacccagacctacatctgcaatgtgaaccacaagcctagcaacaccaaggtggacaagaaggtggaacccaagagctgcgacaagacccacacctgtcctccatgtcctgctccagaactgctgggcggaccttccgtgttcctgtttcctccaaagcctaaggacaccctgatgatcagcagaacccctgaagtgacctgcgtggtggtggatgtgtctcacgaggaccctgaagtgaagttcaattggtacgtggacggcgtggaagtgcacaacgccaagaccaagcctagagaggaacagtacaacagcacctacagagtggtgtccgtgctgaccgtgctgcaccaggattggctgaacggcaaagagtacaagtgcaaggtgtccaacaaggccctgcctgcccctgaggaaaagaccatcagcaaggccaagggccagcctagggaaccccaagtctgtacactgcctcctagccgcgaggaaatgaccaagaaccaggtgtccctgagctgcgccgtgaagggcttttacccttccgatatcgccgtggaatgggagagcaatggccagcctgagaacaactacaagacaacccctcctgtgctggacagcgacggctcattcttcctggtgtccaagctgacagtggacaagagcagatggcagcagggcaacgtgttcagctgctctgtgctgcacgaagccctgcacagccactacacccagaagtccctgtctctgagccccggcaagtgataa

SEQ ID NO: 198 - DNA, 1476 bp, synthetic construct
  source 1..1476: mol_type = other DNA
atggattggatttggagaatcctgttcctcgtgggcgccgctaccggagcccactcccaggtgcatctgacgcagtctgggcctgaggtgaggaagcctgggacctccgtaaaggtctcctgcaaggcccctggaaacacattgaagacttatgatctacactgggtgcgcagcgtccctggacaaggccttcagtggatgggatggataagccatgagggcgacaagaaggtcattgtggaaagattcaaggccaaagtcaccattgattgggacaggtccaccaatacggcctatctccaactgagcggcctcacatctggcgacacggccgtctattattgtgcgaaaggctcaaaacacaggctgcgagattacgctctctacgacgacgacggcgcattgaattgggctgtcgatgttgactacctttcgaacttggaattctggggccaagggaccgccgtcaccgtctcttcagcctctacaaagggccctagcgtgttccctctggctcctagcagcaagtcgacatctggcggaacagccgctctgggctgtctggtcaaggactactttcccgagcctgtgacagtgtcctggaactctggcgctctgacaagcggcgtgcacacatttccagccgtgctgcaaagcagcggcctgtactctctgagcagcgtggtcacagtgccaagctctagcctgggcacccagacctacatctgcaatgtgaaccacaagcctagcaacaccaaggtggacaagaaggtggaacccaagagctgcgacaagacccacacctgtcctccatgtcctgctccagaactgctggccggaccttccgtgttcctgtttcctccaaagcctaaggacaccctgatgatcagcagaacccctgaagtgacctgcgtggtggtggatgtgtctcacgaggaccccgaagtgaagttcaattggtacgtggacggcgtggaagtgcacaatgccaagaccaagcctagagaggaacagtacaacagcacctacagagtggtgtccgtgctgaccgtgctgcaccaggattggctgaacggcaaagagtacaagtgcaaggtgtccaacaaggccctgcctctgcctgaggaaaagaccatcagcaaggccaagggccagcctagggaaccccaggtttacaccctgcctccatgccgcgaggaaatgaccaagaaccaggtgtccctgtggtgcctcgtgaagggcttctacccttccgatatcgccgtggaatgggagagcaatggccagcctgagaacaactacaagacaacccctcctgtgctggacagcgacggctcattcttcctgtacagcaagctgaccgtggacaagtccagatggcagcagggcaacgtgttcagctgtagcgtgctgcacgaagccctgcacagccactacacccagaagtccctgtctctgagccccggcaagtgataa

SEQ ID NO: 199 - DNA, 1476 bp, synthetic construct
  source 1..1476: mol_type = other DNA
atggattggatttggagaatcctgttcctcgtgggcgccgctaccggagcccactcccaggtgcatctgacgcagtctgggcctgaggtgaggaagcctgggacctccgtaaaggtctcctgcaaggcccctggaaacacattgaagacttatgatctacactgggtgcgcagcgtccctggacaaggccttcagtggatgggatggataagccatgagggcgacaagaaggtcattgtggaaagattcaaggccaaagtcaccattgattgggacaggtccaccaatacggcctatctccaactgagcggcctcacatctggcgacacggccgtctattattgtgcgaaaggctcaaaacacaggctgcgagattacgctctctacgacgacgacggcgcattgaattgggctgtcgatgttgactacctttcgaacttggaattctggggccaagggaccgccgtcaccgtctcttcagcctctacaaagggccctagcgtgttccctctggctcctagcagcaagtcgacatctggcggaacagccgctctgggctgtctggtcaaggactactttcccgagcctgtgacagtgtcctggaactctggcgctctgacaagcggcgtgcacacatttccagccgtgctgcaaagcagcggcctgtactctctgagcagcgtggtcacagtgccaagctctagcctgggcacccagacctacatctgcaatgtgaaccacaagcctagcaacaccaaggtggacaagaaggtggaacccaagagctgcgacaagacccacacctgtcctccatgtcctgctccagaactgctggccggaccttccgtgttcctgtttcctccaaagcctaaggacaccctgatgatcagcagaacccctgaagtgacctgcgtggtggtggatgtgtctcacgaggaccctgaagtgaagttcaattggtacgtggacggcgtggaagtgcacaacgccaagaccaagcctagagaggaacagtacaacagcacctacagagtggtgtccgtgctgaccgtgctgcaccaggattggctgaacggcaaagagtacaagtgcaaggtgtccaacaaggccctgcctgcccctgaggaaaagaccatcagcaaggccaagggccagcctagggaaccccaggtttacaccctgcctccatgccgcgaggaaatgaccaagaaccaggtgtccctgtggtgcctcgtgaagggcttctacccttccgatatcgccgtggaatgggagagcaatggccagcctgagaacaactacaagacaacccctcctgtgctggacagcgacggctcattcttcctgtacagcaagctgaccgtggacaagtccagatggcagcagggcaacgtgttcagctgtagcgtgctgcacgaagccctgcacagccactacacccagaagtccctgtctctgagccccggcaagtgataa

SEQ ID NO: 200 - DNA, 1476 bp, synthetic construct
  source 1..1476: mol_type = other DNA
atggattggatttggagaatcctgttcctcgtgggcgccgctaccggagcccactcccaggtgcatctgacgcagtctgggcctgaggtgaggaagcctgggacctccgtaaaggtctcctgcaaggcccctggaaacacattgaagacttatgatctacactgggtgcgcagcgtccctggacaaggccttcagtggatgggatggataagccatgagggcgacaagaaggtcattgtggaaagattcaaggccaaagtcaccattgattgggacaggtccaccaatacggcctatctccaactgagcggcctcacatctggcgacacggccgtctattattgtgcgaaaggctcaaaacacaggctgcgagattacgctctctacgacgacgacggcgcattgaattgggctgtcgatgttgactacctttcgaacttggaattctggggccaagggaccgccgtcaccgtctcttcagcctctacaaagggccctagcgtgttccctctggctcctagcagcaagtcgacatctggcggaacagccgctctgggctgtctggtcaaggactactttcccgagcctgtgacagtgtcctggaactctggcgctctgacaagcggcgtgcacacatttccagccgtgctgcaaagcagcggcctgtactctctgagcagcgtggtcacagtgccaagctctagcctgggcacccagacctacatctgcaatgtgaaccacaagcctagcaacaccaaggtggacaagaaggtggaacccaagagctgcgacaagacccacacctgtcctccatgtcctgctccagaactgctggccggaccttccgtgttcctgtttcctccaaagcctaaggacaccctgatgatcagcagaacccctgaagtgacctgcgtggtggtggatgtgtctcacgaggaccctgaagtgaagttcaattggtacgtggacggcgtggaagtgcacaacgccaagaccaagcctagagaggaacagtacaacagcacctacagagtggtgtccgtgctgaccgtgctgcaccaggattggctgaacggcaaagagtacaagtgcaaggtgtccaacaaggccctgcctgcccctatcgaaaagaccatcagcaaggccaagggccagcctagggaaccccaggtttacaccctgcctccatgccgcgaggaaatgaccaagaaccaggtgtccctgtggtgcctcgtgaagggcttctacccttccgatatcgccgtggaatgggagagcaatggccagcctgagaacaactacaagacaacccctcctgtgctggacagcgacggctcattcttcctgtacagcaagctgaccgtggacaagtccagatggcagcagggcaacgtgttcagctgtagcgtgctgcacgaagccctgcacagccactacacccagaagtccctgtctctgagccccggcaagtgataa

SEQ ID NO: 201 - DNA, 1476 bp, synthetic construct
  source 1..1476: mol_type = other DNA
atggattggatttggagaatcctgttcctcgtgggcgccgctaccggagcccactcccaggtgcatctgacgcagtctgggcctgaggtgaggaagcctgggacctccgtaaaggtctcctgcaaggcccctggaaacacattgaagacttatgatctacactgggtgcgcagcgtccctggacaaggccttcagtggatgggatggataagccatgagggcgacaagaaggtcattgtggaaagattcaaggccaaagtcaccattgattgggacaggtccaccaatacggcctatctccaactgagcggcctcacatctggcgacacggccgtctattattgtgcgaaaggctcaaaacacaggctgcgagattacgctctctacgacgacgacggcgcattgaattgggctgtcgatgttgactacctttcgaacttggaattctggggccaagggaccgccgtcaccgtctcttcagcctctacaaagggccctagcgtgttccctctggctcctagcagcaagtcgacatctggcggaacagccgctctgggctgtctggtcaaggactactttcccgagcctgtgacagtgtcctggaactctggcgctctgacaagcggcgtgcacacatttccagccgtgctgcaaagcagcggcctgtactctctgagcagcgtggtcacagtgccaagctctagcctgggcacccagacctacatctgcaatgtgaaccacaagcctagcaacaccaaggtggacaagaaggtggaacccaagagctgcgacaagacccacacctgtcctccatgtcctgctccagaactgctgggcggaccttccgtgttcctgtttcctccaaagcctaaggacaccctgatgatcagcagaacccctgaagtgacctgcgtggtggtggatgtgtctcacgaggaccctgaagtgaagttcaattggtacgtggacggcgtggaagtgcacaacgccaagaccaagcctagagaggaacagtacaacagcacctacagagtggtgtccgtgctgaccgtgctgcaccaggattggctgaacggcaaagagtacaagtgcaaggtgtccaacaaggccctgcctgcccctgaggaaaagaccatcagcaaggccaagggccagcctagggaaccccaggtttacaccctgcctccatgccgcgaggaaatgaccaagaaccaggtgtccctgtggtgcctcgtgaagggcttctacccttccgatatcgccgtggaatgggagagcaatggccagcctgagaacaactacaagacaacccctcctgtgctggacagcgacggctcattcttcctgtacagcaagctgaccgtggacaagtccagatggcagcagggcaacgtgttcagctgtagcgtgctgcacgaagccctgcacagccactacacccagaagtccctgtctctgagccccggcaagtgataa

SEQ ID NO: 202 - DNA, 1476 bp, synthetic construct
  source 1..1476: mol_type = other DNA
atggattggatttggagaatcctgttcctcgtgggcgccgctaccggagcccactcccaggtgcatctgacgcagtctgggcctgaggtgaggaagcctgggacctccgtaaaggtctcctgcaaggcccctggaaacacattgaagacttatgatctacactgggtgcgcagcgtccctggacaaggccttcagtggatgggatggataagccatgagggcgacaagaaggtcattgtggaaagattcaaggccaaagtcaccattgattgggacaggtccaccaatacggcctatctccaactgagcggcctcacatctggcgacacggccgtctattattgtgcgaaaggctcaaaacacaggctgcgagattacgctctctacgacgacgacggcgcattgaattgggctgtcgatgttgactacctttcgaacttggaattctggggccaagggaccgccgtcaccgtctcttcagcctctacaaagggccctagcgtgttccctctggctcctagcagcaagtcgacatctggcggaacagccgctctgggctgtctggtcaaggactactttcccgagcctgtgacagtgtcctggaactctggcgctctgacaagcggcgtgcacacatttccagccgtgctgcaaagcagcggcctgtactctctgagcagcgtggtcacagtgccaagctctagcctgggcacccagacctacatctgcaatgtgaaccacaagcctagcaacaccaaggtggacaagaaggtggaacccaagagctgcgacaagacccacacctgtcctccatgtcctgctccagaactgctcggcggaccttccgtgttcctgtttcctccaaagcctaaggacaccctgatgatcagcagaacccctgaagtgacctgcgtggtggtggatgtgtctcacgaggaccccgaagtgaagttcaattggtacgtggacggcgtggaagtgcacaacgccaagaccaagcctagagaggaacagtacaacagcacctacagagtggtgtccgtgctgacagtgctgcaccaggattggctgaacggcaaagagtacaagtgcaaggtgtccaacaaggccctgcctgctcctatcgagaaaaccatcagcaaggccaagggccagcctagggaaccccaggtttacacactgcctccaagccgcgacgaactgaccaagaaccaggtgtccctgacctgcctcgtgaagggcttctacccttccgatatcgccgtggaatgggagagcaatggccagcctgagaacaactacaagacaacccctcctgtgctggacagcgacggctcattcttcctgtacagcaagctgactgtggataagtcccggtggcagcagggcaacgtgttcagctgttctgtgatgcacgaagccctgcacaaccactacacccagaaaagcctgtctctgagccccggcaagtgataa

SEQ ID NO: 203 - DNA, 1476 bp, synthetic construct
  source 1..1476: mol_type = other DNA
atggattggatttggagaatcctgttcctcgtgggcgccgctaccggagcccactcccaggtgcatctgacgcagtctgggcctgaggtgaggaagcctgggacctccgtaaaggtctcctgcaaggcccctggaaacacattgaagacttatgatctacactgggtgcgcagcgtccctggacaaggccttcagtggatgggatggataagccatgagggcgacaagaaggtcattgtggaaagattcaaggccaaagtcaccattgattgggacaggtccaccaatacggcctatctccaactgagcggcctcacatctggcgacacggccgtctattattgtgcgaaaggctcaaaacacaggctgcgagattacgctctctacgacgacgacggcgcattgaattgggctgtcgatgttgactacctttcgaacttggaattctggggccaagggaccgccgtcaccgtctcttcagcctctacaaagggccctagcgtgttccctctggctcctagcagcaagtcgacatctggcggaacagccgctctgggctgtctggtcaaggactactttcccgagcctgtgacagtgtcctggaactctggcgctctgacaagcggcgtgcacacatttccagccgtgctgcaaagcagcggcctgtactctctgagcagcgtggtcacagtgccaagctctagcctgggcacccagacctacatctgcaatgtgaaccacaagcctagcaacaccaaggtggacaagaaggtggaacccaagagctgcgacaagacccacacctgtcctccatgtcctgctccagaactgctcggcggaccttccgtgttcctgtttcctccaaagcctaaggacaccctgatgatcagcagaacccctgaagtgacctgcgtggtggtggatgtgtctcacgaggaccccgaagtgaagttcaattggtacgtggacggcgtggaagtgcacaacgccaagaccaagcctagagaggaacagtacaacagcacctacagagtggtgtccgtgctgacagtgctgcaccaggattggctgaacggcaaagagtacaagtgcaaggtgtccaacaaggccctgcctgctcctatcgagaaaaccatcagcaaggccaagggccagcctagggaaccccaggtttacacactgcctccaagccgcgacgaactgaccaagaaccaggtgtccctgacctgcctcgtgaagggcttctacccttccgatatcgccgtggaatgggagagcaatggccagcctgagaacaactacaagacaacccctcctgtgctggacagcgacggctcattcttcctgtacagcaagctgaccgtggacaagtccagatggcagcagggcaacgtgttcagctgtagcgtgctgcacgaagccctgcacagccactacacccagaaaagcctgtctctgagccccggcaaatgataa

SEQ ID NO: 204 - DNA, 1476 bp, synthetic construct
  source 1..1476: mol_type = other DNA
atggattggatttggagaatcctgttcctcgtgggcgccgctaccggagcccactcccaggtgcatctgacgcagtctgggcctgaggtgaggaagcctgggacctccgtaaaggtctcctgcaaggcccctggaaacacattgaagacttatgatctacactgggtgcgcagcgtccctggacaaggccttcagtggatgggatggataagccatgagggcgacaagaaggtcattgtggaaagattcaaggccaaagtcaccattgattgggacaggtccaccaatacggcctatctccaactgagcggcctcacatctggcgacacggccgtctattattgtgcgaaaggctcaaaacacaggctgcgagattacgctctctacgacgacgacggcgcattgaattgggctgtcgatgttgactacctttcgaacttggaattctggggccaagggaccgccgtcaccgtctcttcagcctctacaaagggccctagcgtgttccctctggctcctagcagcaagtcgacatctggcggaacagccgctctgggctgtctggtcaaggactactttcccgagcctgtgacagtgtcctggaactctggcgctctgacaagcggcgtgcacacatttccagccgtgctgcaaagcagcggcctgtactctctgagcagcgtggtcacagtgccaagctctagcctgggcacccagacctacatctgcaatgtgaaccacaagcctagcaacaccaaggtggacaagaaggtggaacccaagagctgcgacaagacccacacctgtcctccatgtcctgctccagaactgctcggcggaccttccgtgttcctgtttcctccaaagcctaaggacaccctgatgatcagcagaacccctgaagtgacctgcgtggtggtggatgtgtctcacgaggaccccgaagtgaagttcaattggtacgtggacggcgtggaagtgcacaacgccaagaccaagcctagagaggaacagtacaacagcacctacagagtggtgtccgtgctgacagtgctgcaccaggattggctgaacggcaaagagtacaagtgcaaggtgtccaacaaggccctgcctgctcctatcgagaaaaccatcagcaaggccaagggccagcctcgcgaacctcaagtctgtacactgcctcctagccgcgacgaactgaccaagaaccaggtgtccctgagctgcgccgtgaagggcttttacccttccgatatcgccgtggaatgggagagcaatggccagcctgagaacaactacaagacaacccctcctgtgctggacagcgacggctcattcttcctggtgtccaagctgacagtggacaagagcagatggcagcagggcaacgtgttcagctgcagcgtgctgcatgaagccctgcacagccactacacccagaagtccctgtctctgagccccggcaagtgataa

SEQ ID NO: 205 - DNA, 1476 bp, synthetic construct
  source 1..1476: mol_type = other DNA
atggattggatttggagaatcctgttcctcgtgggcgccgctaccggagcccactcccaggtgcatctgacgcagtctgggcctgaggtgaggaagcctgggacctccgtaaaggtctcctgcaaggcccctggaaacacattgaagacttatgatctacactgggtgcgcagcgtccctggacaaggccttcagtggatgggatggataagccatgagggcgacaagaaggtcattgtggaaagattcaaggccaaagtcaccattgattgggacaggtccaccaatacggcctatctccaactgagcggcctcacatctggcgacacggccgtctattattgtgcgaaaggctcaaaacacaggctgcgagattacgctctctacgacgacgacggcgcattgaattgggctgtcgatgttgactacctttcgaacttggaattctggggccaagggaccgccgtcaccgtctcttcagcctctacaaagggccctagcgtgttccctctggctcctagcagcaagtcgacatctggcggaacagccgctctgggctgtctggtcaaggactactttcccgagcctgtgacagtgtcctggaactctggcgctctgacaagcggcgtgcacacatttccagccgtgctgcaaagcagcggcctgtactctctgagcagcgtggtcacagtgccaagctctagcctgggcacccagacctacatctgcaatgtgaaccacaagcctagcaacaccaaggtggacaagaaggtggaacccaagagctgcgacaagacccacacctgtcctccatgtcctgctccagaactgctcggcggaccttccgtgttcctgtttcctccaaagcctaaggacaccctgatgatcagcagaacccctgaagtgacctgcgtggtggtggatgtgtctcacgaggaccccgaagtgaagttcaattggtacgtggacggcgtggaagtgcacaacgccaagaccaagcctagagaggaacagtacaacagcacctacagagtggtgtccgtgctgacagtgctgcaccaggattggctgaacggcaaagagtacaagtgcaaggtgtccaacaaggccctgcctgctcctatcgagaaaaccatcagcaaggccaagggccagcctagggaaccccaggtttacaccctgcctccatgccgcgacgaactgaccaagaaccaggtgtccctgtggtgcctggtcaagggcttctacccttccgatatcgccgtggaatgggagagcaatggccagcctgagaacaactacaagacaacccctcctgtgctggacagcgacggctcattcttcctgtacagcaagctgacagtggacaagagcagatggcagcagggcaacgtgttcagctgcagcgtgctgcatgaagccctgcacagccactacacccagaagtccctgtctctgagccccggcaagtgataa

SEQ ID NO: 206 - DNA, 1476 bp, synthetic construct
  source 1..1476: mol_type = other DNA
atggattggatttggagaatcctgttcctcgtgggcgccgctaccggagcccactcccaggtgcatctgacgcagtctgggcctgaggtgaggaagcctgggacctccgtaaaggtctcctgcaaggcccctggaaacacattgaagacttatgatctacactgggtgcgcagcgtccctggacaaggccttcagtggatgggatggataagccatgagggcgacaagaaggtcattgtggaaagattcaaggccaaagtcaccattgattgggacaggtccaccaatacggcctatctccaactgagcggcctcacatctggcgacacggccgtctattattgtgcgaaaggctcaaaacacaggctgcgagattacgctctctacgacgacgacggcgcattgaattgggctgtcgatgttgactacctttcgaacttggaattctggggccaagggaccgccgtcaccgtctcttcagcctctacaaagggccctagcgtgttccctctggctcctagcagcaagtcgacatctggcggaacagccgctctgggctgtctggtcaaggactactttcccgagcctgtgacagtgtcctggaactctggcgctctgacaagcggcgtgcacacatttccagccgtgctgcaaagcagcggcctgtactctctgagcagcgtggtcacagtgccaagctctagcctgggcacccagacctacatctgcaatgtgaaccacaagcctagcaacaccaaggtggacaagaaggtggaacccaagagctgcgacaagacccacacctgtcctccatgtcctgctccagaactgctggccggaccttccgtgttcctgtttcctccaaagcctaaggacaccctgatgatcagcagaacccctgaagtgacctgcgtggtggtggatgtgtctcacgaggaccccgaagtgaagttcaattggtacgtggacggcgtggaagtgcacaatgccaagaccaagcctagagaggaacagtacaacagcacctacagagtggtgtccgtgctgaccgtgctgcaccaggattggctgaacggcaaagagtacaagtgcaaggtgtccaacaaggccctgcctctgcctgaggaaaagaccatcagcaaggccaagggccagcctagggaaccccaggtttacacactgcctccaagccgcgacgaactgaccaagaaccaggtgtccctgacctgcctcgtgaagggcttctacccttccgatatcgccgtggaatgggagagcaatggccagcctgagaacaactacaagacaacccctcctgtgctggacagcgacggctcattcttcctgtacagcaagctgaccgtggacaagtccagatggcagcagggcaacgtgttcagctgtagcgtgctgcacgaagccctgcacagccactacacccagaaaagcctgtctctgagccccggcaaatgataa

SEQ ID NO: 207 - DNA, 1476 bp, synthetic construct
  source 1..1476: mol_type = other DNA
atggattggatttggagaatcctgttcctcgtgggcgccgctaccggagcccactcccaggtgcatctgacgcagtctgggcctgaggtgaggaagcctgggacctccgtaaaggtctcctgcaaggcccctggaaacacattgaagacttatgatctacactgggtgcgcagcgtccctggacaaggccttcagtggatgggatggataagccatgagggcgacaagaaggtcattgtggaaagattcaaggccaaagtcaccattgattgggacaggtccaccaatacggcctatctccaactgagcggcctcacatctggcgacacggccgtctattattgtgcgaaaggctcaaaacacaggctgcgagattacgctctctacgacgacgacggcgcattgaattgggctgtcgatgttgactacctttcgaacttggaattctggggccaagggaccgccgtcaccgtctcttcagcctctacaaagggccctagcgtgttccctctggctcctagcagcaagtcgacatctggcggaacagccgctctgggctgtctggtcaaggactactttcccgagcctgtgacagtgtcctggaactctggcgctctgacaagcggcgtgcacacatttccagccgtgctgcaaagcagcggcctgtactctctgagcagcgtggtcacagtgccaagctctagcctgggcacccagacctacatctgcaatgtgaaccacaagcctagcaacaccaaggtggacaagaaggtggaacccaagagctgcgacaagacccacacctgtcctccatgtcctgctccagaactgctggccggaccttccgtgttcctgtttcctccaaagcctaaggacaccctgatgatcagcagaacccctgaagtgacctgcgtggtggtggatgtgtctcacgaggaccctgaagtgaagttcaattggtacgtggacggcgtggaagtgcacaacgccaagaccaagcctagagaggaacagtacaacagcacctacagagtggtgtccgtgctgaccgtgctgcaccaggattggctgaacggcaaagagtacaagtgcaaggtgtccaacaaggccctgcctgcccctgaggaaaagaccatcagcaaggccaagggccagcctagggaaccccaggtttacacactgcctccaagccgcgacgaactgaccaagaaccaggtgtccctgacctgcctcgtgaagggcttctacccttccgatatcgccgtggaatgggagagcaatggccagcctgagaacaactacaagacaacccctcctgtgctggacagcgacggctcattcttcctgtacagcaagctgaccgtggacaagtccagatggcagcagggcaacgtgttcagctgtagcgtgctgcacgaagccctgcacagccactacacccagaaaagcctgtctctgagccccggcaaatgataa

SEQ ID NO: 208 - DNA, 1476 bp, synthetic construct
  source 1..1476: mol_type = other DNA
atggattggatttggagaatcctgttcctcgtgggcgccgctaccggagcccactcccaggtgcatctgacgcagtctgggcctgaggtgaggaagcctgggacctccgtaaaggtctcctgcaaggcccctggaaacacattgaagacttatgatctacactgggtgcgcagcgtccctggacaaggccttcagtggatgggatggataagccatgagggcgacaagaaggtcattgtggaaagattcaaggccaaagtcaccattgattgggacaggtccaccaatacggcctatctccaactgagcggcctcacatctggcgacacggccgtctattattgtgcgaaaggctcaaaacacaggctgcgagattacgctctctacgacgacgacggcgcattgaattgggctgtcgatgttgactacctttcgaacttggaattctggggccaagggaccgccgtcaccgtctcttcagcctctacaaagggccctagcgtgttccctctggctcctagcagcaagtcgacatctggcggaacagccgctctgggctgtctggtcaaggactactttcccgagcctgtgacagtgtcctggaactctggcgctctgacaagcggcgtgcacacatttccagccgtgctgcaaagcagcggcctgtactctctgagcagcgtggtcacagtgccaagctctagcctgggcacccagacctacatctgcaatgtgaaccacaagcctagcaacaccaaggtggacaagaaggtggaacccaagagctgcgacaagacccacacctgtcctccatgtcctgctccagaactgctggccggaccttccgtgttcctgtttcctccaaagcctaaggacaccctgatgatcagcagaacccctgaagtgacctgcgtggtggtggatgtgtctcacgaggaccctgaagtgaagttcaattggtacgtggacggcgtggaagtgcacaacgccaagaccaagcctagagaggaacagtacaacagcacctacagagtggtgtccgtgctgaccgtgctgcaccaggattggctgaacggcaaagagtacaagtgcaaggtgtccaacaaggccctgcctgcccctatcgaaaagaccatcagcaaggccaagggccagcctagggaaccccaggtttacacactgcctccaagccgcgacgaactgaccaagaaccaggtgtccctgacctgcctcgtgaagggcttctacccttccgatatcgccgtggaatgggagagcaatggccagcctgagaacaactacaagacaacccctcctgtgctggacagcgacggctcattcttcctgtacagcaagctgaccgtggacaagtccagatggcagcagggcaacgtgttcagctgtagcgtgctgcacgaagccctgcacagccactacacccagaaaagcctgtctctgagccccggcaaatgataa

SEQ ID NO: 209 - DNA, 1476 bp, synthetic construct
  source 1..1476: mol_type = other DNA
atggattggatttggagaatcctgttcctcgtgggcgccgctaccggagcccactcccaggtgcatctgacgcagtctgggcctgaggtgaggaagcctgggacctccgtaaaggtctcctgcaaggcccctggaaacacattgaagacttatgatctacactgggtgcgcagcgtccctggacaaggccttcagtggatgggatggataagccatgagggcgacaagaaggtcattgtggaaagattcaaggccaaagtcaccattgattgggacaggtccaccaatacggcctatctccaactgagcggcctcacatctggcgacacggccgtctattattgtgcgaaaggctcaaaacacaggctgcgagattacgctctctacgacgacgacggcgcattgaattgggctgtcgatgttgactacctttcgaacttggaattctggggccaagggaccgccgtcaccgtctcttcagcctctacaaagggccctagcgtgttccctctggctcctagcagcaagtcgacatctggcggaacagccgctctgggctgtctggtcaaggactactttcccgagcctgtgacagtgtcctggaactctggcgctctgacaagcggcgtgcacacatttccagccgtgctgcaaagcagcggcctgtactctctgagcagcgtggtcacagtgccaagctctagcctgggcacccagacctacatctgcaatgtgaaccacaagcctagcaacaccaaggtggacaagaaggtggaacccaagagctgcgacaagacccacacctgtcctccatgtcctgctccagaactgctgggcggaccttccgtgttcctgtttcctccaaagcctaaggacaccctgatgatcagcagaacccctgaagtgacctgcgtggtggtggatgtgtctcacgaggaccctgaagtgaagttcaattggtacgtggacggcgtggaagtgcacaacgccaagaccaagcctagagaggaacagtacaacagcacctacagagtggtgtccgtgctgaccgtgctgcaccaggattggctgaacggcaaagagtacaagtgcaaggtgtccaacaaggccctgcctgcccctgaggaaaagaccatcagcaaggccaagggccagcctagggaaccccaggtttacacactgcctccaagccgcgacgaactgaccaagaaccaggtgtccctgacctgcctcgtgaagggcttctacccttccgatatcgccgtggaatgggagagcaatggccagcctgagaacaactacaagacaacccctcctgtgctggacagcgacggctcattcttcctgtacagcaagctgaccgtggacaagtccagatggcagcagggcaacgtgttcagctgtagcgtgctgcacgaagccctgcacagccactacacccagaaaagcctgtctctgagccccggcaaatgataa

SEQ ID NO: 210 - DNA, 1476 bp, synthetic construct
  source 1..1476: mol_type = other DNA
atggattggatttggagaatcctgttcctcgtgggcgccgctaccggagcccactcccaggtgcatctgacgcagtctgggcctgaggtgaggaagcctgggacctccgtaaaggtctcctgcaaggcccctggaaacacattgaagacttatgatctacactgggtgcgcagcgtccctggacaaggccttcagtggatgggatggataagccatgagggcgacaagaaggtcattgtggaaagattcaaggccaaagtcaccattgattgggacaggtccaccaatacggcctatctccaactgagcggcctcacatctggcgacacggccgtctattattgtgcgaaaggctcaaaacacaggctgcgagattacgctctctacgacgacgacggcgcattgaattgggctgtcgatgttgactacctttcgaacttggaattctggggccaagggaccgccgtcaccgtctcttcagcctctacaaagggccctagcgtgttccctctggctcctagcagcaagtcgacatctggcggaacagccgctctgggctgtctggtcaaggactactttcccgagcctgtgacagtgtcctggaactctggcgctctgacaagcggcgtgcacacatttccagccgtgctgcaaagcagcggcctgtactctctgagcagcgtggtcacagtgccaagctctagcctgggcacccagacctacatctgcaatgtgaaccacaagcctagcaacaccaaggtggacaagaaggtggaacccaagagctgcgacaagacccacacctgtcctccatgtcctgctccagaactgctggccggaccttccgtgttcctgtttcctccaaagcctaaggacaccctgatgatcagcagaacccctgaagtgacctgcgtggtggtggatgtgtctcacgaggaccccgaagtgaagttcaattggtacgtggacggcgtggaagtgcacaatgccaagaccaagcctagagaggaacagtacaacagcacctacagagtggtgtccgtgctgaccgtgctgcaccaggattggctgaacggcaaagagtacaagtgcaaggtgtccaacaaggccctgcctctgcctgaggaaaagaccatcagcaaggccaagggccagcctcgcgaacctcaagtctgtacactgcctcctagccgcgacgaactgaccaagaaccaggtgtccctgagctgcgccgtgaagggcttttacccttccgatatcgccgtggaatgggagagcaatggccagcctgagaacaactacaagacaacccctcctgtgctggacagcgacggctcattcttcctggtgtccaagctgacagtggacaagagcagatggcagcagggcaacgtgttcagctgcagcgtgctgcatgaagccctgcacagccactacacccagaagtccctgtctctgagccccggcaagtgataa

SEQ ID NO: 211 - DNA, 1476 bp, synthetic construct
  source 1..1476: mol_type = other DNA
atggattggatttggagaatcctgttcctcgtgggcgccgctaccggagcccactcccaggtgcatctgacgcagtctgggcctgaggtgaggaagcctgggacctccgtaaaggtctcctgcaaggcccctggaaacacattgaagacttatgatctacactgggtgcgcagcgtccctggacaaggccttcagtggatgggatggataagccatgagggcgacaagaaggtcattgtggaaagattcaaggccaaagtcaccattgattgggacaggtccaccaatacggcctatctccaactgagcggcctcacatctggcgacacggccgtctattattgtgcgaaaggctcaaaacacaggctgcgagattacgctctctacgacgacgacggcgcattgaattgggctgtcgatgttgactacctttcgaacttggaattctggggccaagggaccgccgtcaccgtctcttcagcctctacaaagggccctagcgtgttccctctggctcctagcagcaagtcgacatctggcggaacagccgctctgggctgtctggtcaaggactactttcccgagcctgtgacagtgtcctggaactctggcgctctgacaagcggcgtgcacacatttccagccgtgctgcaaagcagcggcctgtactctctgagcagcgtggtcacagtgccaagctctagcctgggcacccagacctacatctgcaatgtgaaccacaagcctagcaacaccaaggtggacaagaaggtggaacccaagagctgcgacaagacccacacctgtcctccatgtcctgctccagaactgctggccggaccttccgtgttcctgtttcctccaaagcctaaggacaccctgatgatcagcagaacccctgaagtgacctgcgtggtggtggatgtgtctcacgaggaccctgaagtgaagttcaattggtacgtggacggcgtggaagtgcacaacgccaagaccaagcctagagaggaacagtacaacagcacctacagagtggtgtccgtgctgaccgtgctgcaccaggattggctgaacggcaaagagtacaagtgcaaggtgtccaacaaggccctgcctgcccctgaggaaaagaccatcagcaaggccaagggccagcctcgcgaacctcaagtctgtacactgcctcctagccgcgacgaactgaccaagaaccaggtgtccctgagctgcgccgtgaagggcttttacccttccgatatcgccgtggaatgggagagcaatggccagcctgagaacaactacaagacaacccctcctgtgctggacagcgacggctcattcttcctggtgtccaagctgacagtggacaagagcagatggcagcagggcaacgtgttcagctgcagcgtgctgcatgaagccctgcacagccactacacccagaagtccctgtctctgagccccggcaagtgataa

SEQ ID NO: 212 - DNA, 1476 bp, synthetic construct
  source 1..1476: mol_type = other DNA
atggattggatttggagaatcctgttcctcgtgggcgccgctaccggagcccactcccaggtgcatctgacgcagtctgggcctgaggtgaggaagcctgggacctccgtaaaggtctcctgcaaggcccctggaaacacattgaagacttatgatctacactgggtgcgcagcgtccctggacaaggccttcagtggatgggatggataagccatgagggcgacaagaaggtcattgtggaaagattcaaggccaaagtcaccattgattgggacaggtccaccaatacggcctatctccaactgagcggcctcacatctggcgacacggccgtctattattgtgcgaaaggctcaaaacacaggctgcgagattacgctctctacgacgacgacggcgcattgaattgggctgtcgatgttgactacctttcgaacttggaattctggggccaagggaccgccgtcaccgtctcttcagcctctacaaagggccctagcgtgttccctctggctcctagcagcaagtcgacatctggcggaacagccgctctgggctgtctggtcaaggactactttcccgagcctgtgacagtgtcctggaactctggcgctctgacaagcggcgtgcacacatttccagccgtgctgcaaagcagcggcctgtactctctgagcagcgtggtcacagtgccaagctctagcctgggcacccagacctacatctgcaatgtgaaccacaagcctagcaacaccaaggtggacaagaaggtggaacccaagagctgcgacaagacccacacctgtcctccatgtcctgctccagaactgctggccggaccttccgtgttcctgtttcctccaaagcctaaggacaccctgatgatcagcagaacccctgaagtgacctgcgtggtggtggatgtgtctcacgaggaccctgaagtgaagttcaattggtacgtggacggcgtggaagtgcacaacgccaagaccaagcctagagaggaacagtacaacagcacctacagagtggtgtccgtgctgaccgtgctgcaccaggattggctgaacggcaaagagtacaagtgcaaggtgtccaacaaggccctgcctgcccctatcgaaaagaccatcagcaaggccaagggccagcctcgcgaacctcaagtctgtacactgcctcctagccgcgacgaactgaccaagaaccaggtgtccctgagctgcgccgtgaagggcttttacccttccgatatcgccgtggaatgggagagcaatggccagcctgagaacaactacaagacaacccctcctgtgctggacagcgacggctcattcttcctggtgtccaagctgacagtggacaagagcagatggcagcagggcaacgtgttcagctgcagcgtgctgcatgaagccctgcacagccactacacccagaagtccctgtctctgagccccggcaagtgataa

SEQ ID NO: 213 - DNA, 1476 bp, synthetic construct
  source 1..1476: mol_type = other DNA
atggattggatttggagaatcctgttcctcgtgggcgccgctaccggagcccactcccaggtgcatctgacgcagtctgggcctgaggtgaggaagcctgggacctccgtaaaggtctcctgcaaggcccctggaaacacattgaagacttatgatctacactgggtgcgcagcgtccctggacaaggccttcagtggatgggatggataagccatgagggcgacaagaaggtcattgtggaaagattcaaggccaaagtcaccattgattgggacaggtccaccaatacggcctatctccaactgagcggcctcacatctggcgacacggccgtctattattgtgcgaaaggctcaaaacacaggctgcgagattacgctctctacgacgacgacggcgcattgaattgggctgtcgatgttgactacctttcgaacttggaattctggggccaagggaccgccgtcaccgtctcttcagcctctacaaagggccctagcgtgttccctctggctcctagcagcaagtcgacatctggcggaacagccgctctgggctgtctggtcaaggactactttcccgagcctgtgacagtgtcctggaactctggcgctctgacaagcggcgtgcacacatttccagccgtgctgcaaagcagcggcctgtactctctgagcagcgtggtcacagtgccaagctctagcctgggcacccagacctacatctgcaatgtgaaccacaagcctagcaacaccaaggtggacaagaaggtggaacccaagagctgcgacaagacccacacctgtcctccatgtcctgctccagaactgctgggcggaccttccgtgttcctgtttcctccaaagcctaaggacaccctgatgatcagcagaacccctgaagtgacctgcgtggtggtggatgtgtctcacgaggaccctgaagtgaagttcaattggtacgtggacggcgtggaagtgcacaacgccaagaccaagcctagagaggaacagtacaacagcacctacagagtggtgtccgtgctgaccgtgctgcaccaggattggctgaacggcaaagagtacaagtgcaaggtgtccaacaaggccctgcctgcccctgaggaaaagaccatcagcaaggccaagggccagcctcgcgaacctcaagtctgtacactgcctcctagccgcgacgaactgaccaagaaccaggtgtccctgagctgcgccgtgaagggcttttacccttccgatatcgccgtggaatgggagagcaatggccagcctgagaacaactacaagacaacccctcctgtgctggacagcgacggctcattcttcctggtgtccaagctgacagtggacaagagcagatggcagcagggcaacgtgttcagctgcagcgtgctgcatgaagccctgcacagccactacacccagaagtccctgtctctgagccccggcaagtgataa

SEQ ID NO: 214 - DNA, 1476 bp, synthetic construct
  source 1..1476: mol_type = other DNA
atggattggatttggagaatcctgttcctcgtgggcgccgctaccggagcccactcccaggtgcatctgacgcagtctgggcctgaggtgaggaagcctgggacctccgtaaaggtctcctgcaaggcccctggaaacacattgaagacttatgatctacactgggtgcgcagcgtccctggacaaggccttcagtggatgggatggataagccatgagggcgacaagaaggtcattgtggaaagattcaaggccaaagtcaccattgattgggacaggtccaccaatacggcctatctccaactgagcggcctcacatctggcgacacggccgtctattattgtgcgaaaggctcaaaacacaggctgcgagattacgctctctacgacgacgacggcgcattgaattgggctgtcgatgttgactacctttcgaacttggaattctggggccaagggaccgccgtcaccgtctcttcagcctctacaaagggccctagcgtgttccctctggctcctagcagcaagtcgacatctggcggaacagccgctctgggctgtctggtcaaggactactttcccgagcctgtgacagtgtcctggaactctggcgctctgacaagcggcgtgcacacatttccagccgtgctgcaaagcagcggcctgtactctctgagcagcgtggtcacagtgccaagctctagcctgggcacccagacctacatctgcaatgtgaaccacaagcctagcaacaccaaggtggacaagaaggtggaacccaagagctgcgacaagacccacacctgtcctccatgtcctgctccagaactgctggccggaccttccgtgttcctgtttcctccaaagcctaaggacaccctgatgatcagcagaacccctgaagtgacctgcgtggtggtggatgtgtctcacgaggaccccgaagtgaagttcaattggtacgtggacggcgtggaagtgcacaatgccaagaccaagcctagagaggaacagtacaacagcacctacagagtggtgtccgtgctgaccgtgctgcaccaggattggctgaacggcaaagagtacaagtgcaaggtgtccaacaaggccctgcctctgcctgaggaaaagaccatcagcaaggccaagggccagcctagggaaccccaggtttacaccctgcctccatgccgcgacgaactgaccaagaaccaggtgtccctgtggtgcctggtcaagggcttctacccttccgatatcgccgtggaatgggagagcaatggccagcctgagaacaactacaagacaacccctcctgtgctggacagcgacggctcattcttcctgtacagcaagctgacagtggacaagagcagatggcagcagggcaacgtgttcagctgcagcgtgctgcatgaagccctgcacagccactacacccagaagtccctgtctctgagccccggcaagtgataa

SEQ ID NO: 215 - DNA, 1476 bp, synthetic construct
  source 1..1476: mol_type = other DNA
atggattggatttggagaatcctgttcctcgtgggcgccgctaccggagcccactcccaggtgcatctgacgcagtctgggcctgaggtgaggaagcctgggacctccgtaaaggtctcctgcaaggcccctggaaacacattgaagacttatgatctacactgggtgcgcagcgtccctggacaaggccttcagtggatgggatggataagccatgagggcgacaagaaggtcattgtggaaagattcaaggccaaagtcaccattgattgggacaggtccaccaatacggcctatctccaactgagcggcctcacatctggcgacacggccgtctattattgtgcgaaaggctcaaaacacaggctgcgagattacgctctctacgacgacgacggcgcattgaattgggctgtcgatgttgactacctttcgaacttggaattctggggccaagggaccgccgtcaccgtctcttcagcctctacaaagggccctagcgtgttccctctggctcctagcagcaagtcgacatctggcggaacagccgctctgggctgtctggtcaaggactactttcccgagcctgtgacagtgtcctggaactctggcgctctgacaagcggcgtgcacacatttccagccgtgctgcaaagcagcggcctgtactctctgagcagcgtggtcacagtgccaagctctagcctgggcacccagacctacatctgcaatgtgaaccacaagcctagcaacaccaaggtggacaagaaggtggaacccaagagctgcgacaagacccacacctgtcctccatgtcctgctccagaactgctggccggaccttccgtgttcctgtttcctccaaagcctaaggacaccctgatgatcagcagaacccctgaagtgacctgcgtggtggtggatgtgtctcacgaggaccctgaagtgaagttcaattggtacgtggacggcgtggaagtgcacaacgccaagaccaagcctagagaggaacagtacaacagcacctacagagtggtgtccgtgctgaccgtgctgcaccaggattggctgaacggcaaagagtacaagtgcaaggtgtccaacaaggccctgcctgcccctgaggaaaagaccatcagcaaggccaagggccagcctagggaaccccaggtttacaccctgcctccatgccgcgacgaactgaccaagaaccaggtgtccctgtggtgcctggtcaagggcttctacccttccgatatcgccgtggaatgggagagcaatggccagcctgagaacaactacaagacaacccctcctgtgctggacagcgacggctcattcttcctgtacagcaagctgacagtggacaagagcagatggcagcagggcaacgtgttcagctgcagcgtgctgcatgaagccctgcacagccactacacccagaagtccctgtctctgagccccggcaagtgataa

SEQ ID NO: 216 - DNA, 1476 bp, synthetic construct
  source 1..1476: mol_type = other DNA
atggattggatttggagaatcctgttcctcgtgggcgccgctaccggagcccactcccaggtgcatctgacgcagtctgggcctgaggtgaggaagcctgggacctccgtaaaggtctcctgcaaggcccctggaaacacattgaagacttatgatctacactgggtgcgcagcgtccctggacaaggccttcagtggatgggatggataagccatgagggcgacaagaaggtcattgtggaaagattcaaggccaaagtcaccattgattgggacaggtccaccaatacggcctatctccaactgagcggcctcacatctggcgacacggccgtctattattgtgcgaaaggctcaaaacacaggctgcgagattacgctctctacgacgacgacggcgcattgaattgggctgtcgatgttgactacctttcgaacttggaattctggggccaagggaccgccgtcaccgtctcttcagcctctacaaagggccctagcgtgttccctctggctcctagcagcaagtcgacatctggcggaacagccgctctgggctgtctggtcaaggactactttcccgagcctgtgacagtgtcctggaactctggcgctctgacaagcggcgtgcacacatttccagccgtgctgcaaagcagcggcctgtactctctgagcagcgtggtcacagtgccaagctctagcctgggcacccagacctacatctgcaatgtgaaccacaagcctagcaacaccaaggtggacaagaaggtggaacccaagagctgcgacaagacccacacctgtcctccatgtcctgctccagaactgctggccggaccttccgtgttcctgtttcctccaaagcctaaggacaccctgatgatcagcagaacccctgaagtgacctgcgtggtggtggatgtgtctcacgaggaccctgaagtgaagttcaattggtacgtggacggcgtggaagtgcacaacgccaagaccaagcctagagaggaacagtacaacagcacctacagagtggtgtccgtgctgaccgtgctgcaccaggattggctgaacggcaaagagtacaagtgcaaggtgtccaacaaggccctgcctgcccctatcgaaaagaccatcagcaaggccaagggccagcctagggaaccccaggtttacaccctgcctccatgccgcgacgaactgaccaagaaccaggtgtccctgtggtgcctggtcaagggcttctacccttccgatatcgccgtggaatgggagagcaatggccagcctgagaacaactacaagacaacccctcctgtgctggacagcgacggctcattcttcctgtacagcaagctgacagtggacaagagcagatggcagcagggcaacgtgttcagctgcagcgtgctgcatgaagccctgcacagccactacacccagaagtccctgtctctgagccccggcaagtgataa

SEQ ID NO: 217 - DNA, 1476 bp, synthetic construct
  source 1..1476: mol_type = other DNA
atggattggatttggagaatcctgttcctcgtgggcgccgctaccggagcccactcccaggtgcatctgacgcagtctgggcctgaggtgaggaagcctgggacctccgtaaaggtctcctgcaaggcccctggaaacacattgaagacttatgatctacactgggtgcgcagcgtccctggacaaggccttcagtggatgggatggataagccatgagggcgacaagaaggtcattgtggaaagattcaaggccaaagtcaccattgattgggacaggtccaccaatacggcctatctccaactgagcggcctcacatctggcgacacggccgtctattattgtgcgaaaggctcaaaacacaggctgcgagattacgctctctacgacgacgacggcgcattgaattgggctgtcgatgttgactacctttcgaacttggaattctggggccaagggaccgccgtcaccgtctcttcagcctctacaaagggccctagcgtgttccctctggctcctagcagcaagtcgacatctggcggaacagccgctctgggctgtctggtcaaggactactttcccgagcctgtgacagtgtcctggaactctggcgctctgacaagcggcgtgcacacatttccagccgtgctgcaaagcagcggcctgtactctctgagcagcgtggtcacagtgccaagctctagcctgggcacccagacctacatctgcaatgtgaaccacaagcctagcaacaccaaggtggacaagaaggtggaacccaagagctgcgacaagacccacacctgtcctccatgtcctgctccagaactgctgggcggaccttccgtgttcctgtttcctccaaagcctaaggacaccctgatgatcagcagaacccctgaagtgacctgcgtggtggtggatgtgtctcacgaggaccctgaagtgaagttcaattggtacgtggacggcgtggaagtgcacaacgccaagaccaagcctagagaggaacagtacaacagcacctacagagtggtgtccgtgctgaccgtgctgcaccaggattggctgaacggcaaagagtacaagtgcaaggtgtccaacaaggccctgcctgcccctgaggaaaagaccatcagcaaggccaagggccagcctagggaaccccaggtttacaccctgcctccatgccgcgacgaactgaccaagaaccaggtgtccctgtggtgcctggtcaagggcttctacccttccgatatcgccgtggaatgggagagcaatggccagcctgagaacaactacaagacaacccctcctgtgctggacagcgacggctcattcttcctgtacagcaagctgacagtggacaagagcagatggcagcagggcaacgtgttcagctgcagcgtgctgcatgaagccctgcacagccactacacccagaagtccctgtctctgagccccggcaagtgataa

SEQ ID NO: 218 - RNA, 1476 nt, synthetic construct
  source 1..1476: mol_type = other RNA
atggattggatttggagaatcctgttcctcgtgggcgccgctaccggagcccactcccaggtgcatctgacgcagtctgggcctgaggtgaggaagcctgggacctccgtaaaggtctcctgcaaggcccctggaaacacattgaagacttatgatctacactgggtgcgcagcgtccctggacaaggccttcagtggatgggatggataagccatgagggcgacaagaaggtcattgtggaaagattcaaggccaaagtcaccattgattgggacaggtccaccaatacggcctatctccaactgagcggcctcacatctggcgacacggccgtctattattgtgcgaaaggctcaaaacacaggctgcgagattacgctctctacgacgacgacggcgcattgaattgggctgtcgatgttgactacctttcgaacttggaattctggggccaagggaccgccgtcaccgtctcttcagcctctacaaagggccctagcgtgttccctctggctcctagcagcaagtcgacatctggcggaacagccgctctgggctgtctggtcaaggactactttcccgagcctgtgacagtgtcctggaactctggcgctctgacaagcggcgtgcacacatttccagccgtgctgcaaagcagcggcctgtactctctgagcagcgtggtcacagtgccaagctctagcctgggcacccagacctacatctgcaatgtgaaccacaagcctagcaacaccaaggtggacaagagagtggaacccaagagctgcgacaagacccacacctgtcctccatgtcctgctccagaactgctcggcggaccttccgtgttcctgtttcctccaaagcctaaggacaccctgatgatcagcagaacccctgaagtgacctgcgtggtggtggatgtgtctcacgaggaccccgaagtgaagttcaattggtacgtggacggcgtggaagtgcacaacgccaagaccaagcctagagaggaacagtacaacagcacctacagagtggtgtccgtgctgacagtgctgcaccaggattggctgaacggcaaagagtacaagtgcaaggtgtccaacaaggccctgcctgctcctatcgagaaaaccatcagcaaggccaagggccagcctagggaaccccaggtttacacactgcctccaagccgcgaggaaatgaccaagaaccaggtgtccctgacctgcctcgtgaagggcttctacccttccgatatcgccgtggaatgggagagcaatggccagcctgagaacaactacaagacaacccctcctgtgctggacagcgacggctcattcttcctgtacagcaagctgactgtggataagtcccggtggcagcagggcaacgtgttcagctgttctgtgatgcacgaagccctgcacaaccactacacccagaaaagcctgtctctgagccccggcaagtgataa

SEQ ID NO: 219 - RNA, 1476 nt, synthetic construct
  source 1..1476: mol_type = other RNA
atggattggatttggagaatcctgttcctcgtgggcgccgctaccggagcccactcccaggtgcatctgacgcagtctgggcctgaggtgaggaagcctgggacctccgtaaaggtctcctgcaaggcccctggaaacacattgaagacttatgatctacactgggtgcgcagcgtccctggacaaggccttcagtggatgggatggataagccatgagggcgacaagaaggtcattgtggaaagattcaaggccaaagtcaccattgattgggacaggtccaccaatacggcctatctccaactgagcggcctcacatctggcgacacggccgtctattattgtgcgaaaggctcaaaacacaggctgcgagattacgctctctacgacgacgacggcgcattgaattgggctgtcgatgttgactacctttcgaacttggaattctggggccaagggaccgccgtcaccgtctcttcagcctctacaaagggccctagcgtgttccctctggctcctagcagcaagtcgacatctggcggaacagccgctctgggctgtctggtcaaggactactttcccgagcctgtgacagtgtcctggaactctggcgctctgacaagcggcgtgcacacatttccagccgtgctgcaaagcagcggcctgtactctctgagcagcgtggtcacagtgccaagctctagcctgggcacccagacctacatctgcaatgtgaaccacaagcctagcaacaccaaggtggacaagagagtggaacccaagagctgcgacaagacccacacctgtcctccatgtcctgctccagaactgctcggcggaccttccgtgttcctgtttcctccaaagcctaaggacaccctgatgatcagcagaacccctgaagtgacctgcgtggtggtggatgtgtctcacgaggaccccgaagtgaagttcaattggtacgtggacggcgtggaagtgcacaacgccaagaccaagcctagagaggaacagtacaacagcacctacagagtggtgtccgtgctgacagtgctgcaccaggattggctgaacggcaaagagtacaagtgcaaggtgtccaacaaggccctgcctgctcctatcgagaaaaccatcagcaaggccaagggccagcctagggaaccccaggtttacacactgcctccaagccgcgaggaaatgaccaagaaccaggtgtccctgacctgcctcgtgaagggcttctacccttccgatatcgccgtggaatgggagagcaatggccagcctgagaacaactacaagacaacccctcctgtgctggacagcgacggctcattcttcctgtacagcaagctgaccgtggacaagtccagatggcagcagggcaacgtgttcagctgtagcgtgctgcacgaagccctgcacagccactacacccagaaaagcctgtctctgagccccggcaaatgataa

SEQ ID NO: 220 - RNA, 1476 nt, synthetic construct
  source 1..1476: mol_type = other RNA
atggattggatttggagaatcctgttcctcgtgggcgccgctaccggagcccactcccaggtgcatctgacgcagtctgggcctgaggtgaggaagcctgggacctccgtaaaggtctcctgcaaggcccctggaaacacattgaagacttatgatctacactgggtgcgcagcgtccctggacaaggccttcagtggatgggatggataagccatgagggcgacaagaaggtcattgtggaaagattcaaggccaaagtcaccattgattgggacaggtccaccaatacggcctatctccaactgagcggcctcacatctggcgacacggccgtctattattgtgcgaaaggctcaaaacacaggctgcgagattacgctctctacgacgacgacggcgcattgaattgggctgtcgatgttgactacctttcgaacttggaattctggggccaagggaccgccgtcaccgtctcttcagcctctacaaagggccctagcgtgttccctctggctcctagcagcaagtcgacatctggcggaacagccgctctgggctgtctggtcaaggactactttcccgagcctgtgacagtgtcctggaactctggcgctctgacaagcggcgtgcacacatttccagccgtgctgcaaagcagcggcctgtactctctgagcagcgtggtcacagtgccaagctctagcctgggcacccagacctacatctgcaatgtgaaccacaagcctagcaacaccaaggtggacaagagagtggaacccaagagctgcgacaagacccacacctgtcctccatgtcctgctccagaactgctcggcggaccttccgtgttcctgtttcctccaaagcctaaggacaccctgatgatcagcagaacccctgaagtgacctgcgtggtggtggatgtgtctcacgaggaccccgaagtgaagttcaattggtacgtggacggcgtggaagtgcacaacgccaagaccaagcctagagaggaacagtacaacagcacctacagagtggtgtccgtgctgacagtgctgcaccaggattggctgaacggcaaagagtacaagtgcaaggtgtccaacaaggccctgcctgctcctatcgagaaaaccatcagcaaggccaagggccagcctagggaaccccaagtctgtacactgcctcctagccgcgaggaaatgaccaagaaccaggtgtccctgagctgcgccgtgaagggcttttacccttccgatatcgccgtggaatgggagagcaatggccagcctgagaacaactacaagacaacccctcctgtgctggacagcgacggctcattcttcctggtgtccaagctgacagtggacaagagcagatggcagcagggcaacgtgttcagctgctctgtgctgcacgaagccctgcacagccactacacccagaagtccctgtctctgagccccggcaagtgataa

SEQ ID NO: 221 - RNA, 1476 nt, synthetic construct
  source 1..1476: mol_type = other RNA
atggactggatctggcgcatcctgtttcttgtgggagccgccacaggcgcccattctcaagttcatctgacacagagcggccctgaagtgcggaagcctggcacaagcgtgaaggtgtcctgtaaagcccctggcaacaccctgaaaacctacgacctgcactgggtccgatctgtgcctggacaaggactgcagtggatgggctggattagccacgagggcgacaagaaagtgatcgtggaacggttcaaggccaaagtgaccatcgactgggacagaagcaccaacaccgcctacctgcagctgagcggactgacatctggcgataccgccgtgtactactgtgccaagggcagcaagcaccggctgagagattacgccctgtacgacgatgacggcgccctgaattgggccgtcgatgtggactacctgagcaacctggaattctggggccagggaacagccgtgacagtgtctagcgcctctacaaagggccctagcgtgttccctctggctcctagcagcaagtcgacatctggcggaacagccgctctgggctgtctggtcaaggactactttcccgagcctgtgacagtgtcctggaactctggcgctctgacaagcggcgtgcacacatttccagccgtgctgcaaagcagcggcctgtactctctgagcagcgtggtcacagtgccaagctctagcctgggcacccagacctacatctgcaatgtgaaccacaagcctagcaacaccaaggtggacaagagagtggaacccaagagctgcgacaagacccacacctgtcctccatgtcctgctccagaactgctcggcggaccttccgtgttcctgtttcctccaaagcctaaggacaccctgatgatcagcagaacccctgaagtgacctgcgtggtggtggatgtgtctcacgaggaccccgaagtgaagttcaattggtacgtggacggcgtggaagtgcacaacgccaagaccaagcctagagaggaacagtacaacagcacctacagagtggtgtccgtgctgacagtgctgcaccaggattggctgaacggcaaagagtacaagtgcaaggtgtccaacaaggccctgcctgctcctatcgagaaaaccatcagcaaggccaagggccagcctagggaaccccaggtttacaccctgcctccatgccgcgaggaaatgaccaagaaccaggtgtccctgtggtgcctcgtgaagggcttctacccttccgatatcgccgtggaatgggagagcaatggccagcctgagaacaactacaagacaacccctcctgtgctggacagcgacggctcattcttcctgtacagcaagctgaccgtggacaagtccagatggcagcagggcaacgtgttcagctgtagcgtgctgcacgaagccctgcacagccactacacccagaagtccctgtctctgagccccggcaagtgataa

SEQ ID NO: 222 - RNA, 1476 nt, synthetic construct
  source 1..1476: mol_type = other RNA
atggattggatttggagaatcctgttcctcgtgggcgccgctaccggagcccactcccaggtgcatctgacgcagtctgggcctgaggtgaggaagcctgggacctccgtaaaggtctcctgcaaggcccctggaaacacattgaagacttatgatctacactgggtgcgcagcgtccctggacaaggccttcagtggatgggatggataagccatgagggcgacaagaaggtcattgtggaaagattcaaggccaaagtcaccattgattgggacaggtccaccaatacggcctatctccaactgagcggcctcacatctggcgacacggccgtctattattgtgcgaaaggctcaaaacacaggctgcgagattacgctctctacgacgacgacggcgcattgaattgggctgtcgatgttgactacctttcgaacttggaattctggggccaagggaccgccgtcaccgtctcttcagcctctacaaagggccctagcgtgttccctctggctcctagcagcaagtcgacatctggcggaacagccgctctgggctgtctggtcaaggactactttcccgagcctgtgacagtgtcctggaactctggcgctctgacaagcggcgtgcacacatttccagccgtgctgcaaagcagcggcctgtactctctgagcagcgtggtcacagtgccaagctctagcctgggcacccagacctacatctgcaatgtgaaccacaagcctagcaacaccaaggtggacaagagagtggaacccaagagctgcgacaagacccacacctgtcctccatgtcctgctccagaactgctggccggaccttccgtgttcctgtttcctccaaagcctaaggacaccctgatgatcagcagaacccctgaagtgacctgcgtggtggtggatgtgtctcacgaggaccccgaagtgaagttcaattggtacgtggacggcgtggaagtgcacaatgccaagaccaagcctagagaggaacagtacaacagcacctacagagtggtgtccgtgctgaccgtgctgcaccaggattggctgaacggcaaagagtacaagtgcaaggtgtccaacaaggccctgcctctgcctgaggaaaagaccatcagcaaggccaagggccagcctagggaaccccaggtttacacactgcctccaagccgcgaggaaatgaccaagaaccaggtgtccctgacctgcctcgtgaagggcttctacccttccgatatcgccgtggaatgggagagcaatggccagcctgagaacaactacaagacaacccctcctgtgctggacagcgacggctcattcttcctgtacagcaagctgaccgtggacaagtccagatggcagcagggcaacgtgttcagctgtagcgtgctgcacgaagccctgcacagccactacacccagaaaagcctgtctctgagccccggcaaatgataa

SEQ ID NO: 223 - RNA, 1476 nt, synthetic construct
  source 1..1476: mol_type = other RNA
atggattggatttggagaatcctgttcctcgtgggcgccgctaccggagcccactcccaggtgcatctgacgcagtctgggcctgaggtgaggaagcctgggacctccgtaaaggtctcctgcaaggcccctggaaacacattgaagacttatgatctacactgggtgcgcagcgtccctggacaaggccttcagtggatgggatggataagccatgagggcgacaagaaggtcattgtggaaagattcaaggccaaagtcaccattgattgggacaggtccaccaatacggcctatctccaactgagcggcctcacatctggcgacacggccgtctattattgtgcgaaaggctcaaaacacaggctgcgagattacgctctctacgacgacgacggcgcattgaattgggctgtcgatgttgactacctttcgaacttggaattctggggccaagggaccgccgtcaccgtctcttcagcctctacaaagggccctagcgtgttccctctggctcctagcagcaagtcgacatctggcggaacagccgctctgggctgtctggtcaaggactactttcccgagcctgtgacagtgtcctggaactctggcgctctgacaagcggcgtgcacacatttccagccgtgctgcaaagcagcggcctgtactctctgagcagcgtggtcacagtgccaagctctagcctgggcacccagacctacatctgcaatgtgaaccacaagcctagcaacaccaaggtggacaagagagtggaacccaagagctgcgacaagacccacacctgtcctccatgtcctgctccagaactgctggccggaccttccgtgttcctgtttcctccaaagcctaaggacaccctgatgatcagcagaacccctgaagtgacctgcgtggtggtggatgtgtctcacgaggaccctgaagtgaagttcaattggtacgtggacggcgtggaagtgcacaacgccaagaccaagcctagagaggaacagtacaacagcacctacagagtggtgtccgtgctgaccgtgctgcaccaggattggctgaacggcaaagagtacaagtgcaaggtgtccaacaaggccctgcctgcccctgaggaaaagaccatcagcaaggccaagggccagcctagggaaccccaggtttacacactgcctccaagccgcgaggaaatgaccaagaaccaggtgtccctgacctgcctcgtgaagggcttctacccttccgatatcgccgtggaatgggagagcaatggccagcctgagaacaactacaagacaacccctcctgtgctggacagcgacggctcattcttcctgtacagcaagctgaccgtggacaagtccagatggcagcagggcaacgtgttcagctgtagcgtgctgcacgaagccctgcacagccactacacccagaaaagcctgtctctgagccccggcaaatgataa

SEQ ID NO: 224 - RNA, 1476 nt, synthetic construct
  source 1..1476: mol_type = other RNA
atggattggatttggagaatcctgttcctcgtgggcgccgctaccggagcccactcccaggtgcatctgacgcagtctgggcctgaggtgaggaagcctgggacctccgtaaaggtctcctgcaaggcccctggaaacacattgaagacttatgatctacactgggtgcgcagcgtccctggacaaggccttcagtggatgggatggataagccatgagggcgacaagaaggtcattgtggaaagattcaaggccaaagtcaccattgattgggacaggtccaccaatacggcctatctccaactgagcggcctcacatctggcgacacggccgtctattattgtgcgaaaggctcaaaacacaggctgcgagattacgctctctacgacgacgacggcgcattgaattgggctgtcgatgttgactacctttcgaacttggaattctggggccaagggaccgccgtcaccgtctcttcagcctctacaaagggccctagcgtgttccctctggctcctagcagcaagtcgacatctggcggaacagccgctctgggctgtctggtcaaggactactttcccgagcctgtgacagtgtcctggaactctggcgctctgacaagcggcgtgcacacatttccagccgtgctgcaaagcagcggcctgtactctctgagcagcgtggtcacagtgccaagctctagcctgggcacccagacctacatctgcaatgtgaaccacaagcctagcaacaccaaggtggacaagagagtggaacccaagagctgcgacaagacccacacctgtcctccatgtcctgctccagaactgctggccggaccttccgtgttcctgtttcctccaaagcctaaggacaccctgatgatcagcagaacccctgaagtgacctgcgtggtggtggatgtgtctcacgaggaccctgaagtgaagttcaattggtacgtggacggcgtggaagtgcacaacgccaagaccaagcctagagaggaacagtacaacagcacctacagagtggtgtccgtgctgaccgtgctgcaccaggattggctgaacggcaaagagtacaagtgcaaggtgtccaacaaggccctgcctgcccctatcgaaaagaccatcagcaaggccaagggccagcctagggaaccccaggtttacacactgcctccaagccgcgaggaaatgaccaagaaccaggtgtccctgacctgcctcgtgaagggcttctacccttccgatatcgccgtggaatgggagagcaatggccagcctgagaacaactacaagacaacccctcctgtgctggacagcgacggctcattcttcctgtacagcaagctgaccgtggacaagtccagatggcagcagggcaacgtgttcagctgtagcgtgctgcacgaagccctgcacagccactacacccagaaaagcctgtctctgagccccggcaaatgataa

SEQ ID NO: 225 - RNA, 1476 nt, synthetic construct
  source 1..1476: mol_type = other RNA
atggattggatttggagaatcctgttcctcgtgggcgccgctaccggagcccactcccaggtgcatctgacgcagtctgggcctgaggtgaggaagcctgggacctccgtaaaggtctcctgcaaggcccctggaaacacattgaagacttatgatctacactgggtgcgcagcgtccctggacaaggccttcagtggatgggatggataagccatgagggcgacaagaaggtcattgtggaaagattcaaggccaaagtcaccattgattgggacaggtccaccaatacggcctatctccaactgagcggcctcacatctggcgacacggccgtctattattgtgcgaaaggctcaaaacacaggctgcgagattacgctctctacgacgacgacggcgcattgaattgggctgtcgatgttgactacctttcgaacttggaattctggggccaagggaccgccgtcaccgtctcttcagcctctacaaagggccctagcgtgttccctctggctcctagcagcaagtcgacatctggcggaacagccgctctgggctgtctggtcaaggactactttcccgagcctgtgacagtgtcctggaactctggcgctctgacaagcggcgtgcacacatttccagccgtgctgcaaagcagcggcctgtactctctgagcagcgtggtcacagtgccaagctctagcctgggcacccagacctacatctgcaatgtgaaccacaagcctagcaacaccaaggtggacaagagagtggaacccaagagctgcgacaagacccacacctgtcctccatgtcctgctccagaactgctgggcggaccttccgtgttcctgtttcctccaaagcctaaggacaccctgatgatcagcagaacccctgaagtgacctgcgtggtggtggatgtgtctcacgaggaccctgaagtgaagttcaattggtacgtggacggcgtggaagtgcacaacgccaagaccaagcctagagaggaacagtacaacagcacctacagagtggtgtccgtgctgaccgtgctgcaccaggattggctgaacggcaaagagtacaagtgcaaggtgtccaacaaggccctgcctgcccctgaggaaaagaccatcagcaaggccaagggccagcctagggaaccccaggtttacacactgcctccaagccgcgaggaaatgaccaagaaccaggtgtccctgacctgcctcgtgaagggcttctacccttccgatatcgccgtggaatgggagagcaatggccagcctgagaacaactacaagacaacccctcctgtgctggacagcgacggctcattcttcctgtacagcaagctgaccgtggacaagtccagatggcagcagggcaacgtgttcagctgtagcgtgctgcacgaagccctgcacagccactacacccagaaaagcctgtctctgagccccggcaaatgataa

SEQ ID NO: 226 - RNA, 1476 nt, synthetic construct
  source 1..1476: mol_type = other RNA
atggattggatttggagaatcctgttcctcgtgggcgccgctaccggagcccactcccaggtgcatctgacgcagtctgggcctgaggtgaggaagcctgggacctccgtaaaggtctcctgcaaggcccctggaaacacattgaagacttatgatctacactgggtgcgcagcgtccctggacaaggccttcagtggatgggatggataagccatgagggcgacaagaaggtcattgtggaaagattcaaggccaaagtcaccattgattgggacaggtccaccaatacggcctatctccaactgagcggcctcacatctggcgacacggccgtctattattgtgcgaaaggctcaaaacacaggctgcgagattacgctctctacgacgacgacggcgcattgaattgggctgtcgatgttgactacctttcgaacttggaattctggggccaagggaccgccgtcaccgtctcttcagcctctacaaagggccctagcgtgttccctctggctcctagcagcaagtcgacatctggcggaacagccgctctgggctgtctggtcaaggactactttcccgagcctgtgacagtgtcctggaactctggcgctctgacaagcggcgtgcacacatttccagccgtgctgcaaagcagcggcctgtactctctgagcagcgtggtcacagtgccaagctctagcctgggcacccagacctacatctgcaatgtgaaccacaagcctagcaacaccaaggtggacaagagagtggaacccaagagctgcgacaagacccacacctgtcctccatgtcctgctccagaactgctggccggaccttccgtgttcctgtttcctccaaagcctaaggacaccctgatgatcagcagaacccctgaagtgacctgcgtggtggtggatgtgtctcacgaggaccccgaagtgaagttcaattggtacgtggacggcgtggaagtgcacaatgccaagaccaagcctagagaggaacagtacaacagcacctacagagtggtgtccgtgctgaccgtgctgcaccaggattggctgaacggcaaagagtacaagtgcaaggtgtccaacaaggccctgcctctgcctgaggaaaagaccatcagcaaggccaagggccagcctagggaaccccaagtctgtacactgcctcctagccgcgaggaaatgaccaagaaccaggtgtccctgagctgcgccgtgaagggcttttacccttccgatatcgccgtggaatgggagagcaatggccagcctgagaacaactacaagacaacccctcctgtgctggacagcgacggctcattcttcctggtgtccaagctgacagtggacaagagcagatggcagcagggcaacgtgttcagctgctctgtgctgcacgaagccctgcacagccactacacccagaagtccctgtctctgagccccggcaagtgataa

SEQ ID NO: 227 - RNA, 1476 nt, synthetic construct
  source 1..1476: mol_type = other RNA
atggattggatttggagaatcctgttcctcgtgggcgccgctaccggagcccactcccaggtgcatctgacgcagtctgggcctgaggtgaggaagcctgggacctccgtaaaggtctcctgcaaggcccctggaaacacattgaagacttatgatctacactgggtgcgcagcgtccctggacaaggccttcagtggatgggatggataagccatgagggcgacaagaaggtcattgtggaaagattcaaggccaaagtcaccattgattgggacaggtccaccaatacggcctatctccaactgagcggcctcacatctggcgacacggccgtctattattgtgcgaaaggctcaaaacacaggctgcgagattacgctctctacgacgacgacggcgcattgaattgggctgtcgatgttgactacctttcgaacttggaattctggggccaagggaccgccgtcaccgtctcttcagcctctacaaagggccctagcgtgttccctctggctcctagcagcaagtcgacatctggcggaacagccgctctgggctgtctggtcaaggactactttcccgagcctgtgacagtgtcctggaactctggcgctctgacaagcggcgtgcacacatttccagccgtgctgcaaagcagcggcctgtactctctgagcagcgtggtcacagtgccaagctctagcctgggcacccagacctacatctgcaatgtgaaccacaagcctagcaacaccaaggtggacaagagagtggaacccaagagctgcgacaagacccacacctgtcctccatgtcctgctccagaactgctggccggaccttccgtgttcctgtttcctccaaagcctaaggacaccctgatgatcagcagaacccctgaagtgacctgcgtggtggtggatgtgtctcacgaggaccctgaagtgaagttcaattggtacgtggacggcgtggaagtgcacaacgccaagaccaagcctagagaggaacagtacaacagcacctacagagtggtgtccgtgctgaccgtgctgcaccaggattggctgaacggcaaagagtacaagtgcaaggtgtccaacaaggccctgcctgcccctgaggaaaagaccatcagcaaggccaagggccagcctagggaaccccaagtctgtacactgcctcctagccgcgaggaaatgaccaagaaccaggtgtccctgagctgcgccgtgaagggcttttacccttccgatatcgccgtggaatgggagagcaatggccagcctgagaacaactacaagacaacccctcctgtgctggacagcgacggctcattcttcctggtgtccaagctgacagtggacaagagcagatggcagcagggcaacgtgttcagctgctctgtgctgcacgaagccctgcacagccactacacccagaagtccctgtctctgagccccggcaagtgataa

SEQ ID NO: 228 - RNA, 1476 nt, synthetic construct
  source 1..1476: mol_type = other RNA
atggattggatttggagaatcctgttcctcgtgggcgccgctaccggagcccactcccaggtgcatctgacgcagtctgggcctgaggtgaggaagcctgggacctccgtaaaggtctcctgcaaggcccctggaaacacattgaagacttatgatctacactgggtgcgcagcgtccctggacaaggccttcagtggatgggatggataagccatgagggcgacaagaaggtcattgtggaaagattcaaggccaaagtcaccattgattgggacaggtccaccaatacggcctatctccaactgagcggcctcacatctggcgacacggccgtctattattgtgcgaaaggctcaaaacacaggctgcgagattacgctctctacgacgacgacggcgcattgaattgggctgtcgatgttgactacctttcgaacttggaattctggggccaagggaccgccgtcaccgtctcttcagcctctacaaagggccctagcgtgttccctctggctcctagcagcaagtcgacatctggcggaacagccgctctgggctgtctggtcaaggactactttcccgagcctgtgacagtgtcctggaactctggcgctctgacaagcggcgtgcacacatttccagccgtgctgcaaagcagcggcctgtactctctgagcagcgtggtcacagtgccaagctctagcctgggcacccagacctacatctgcaatgtgaaccacaagcctagcaacaccaaggtggacaagagagtggaacccaagagctgcgacaagacccacacctgtcctccatgtcctgctccagaactgctggccggaccttccgtgttcctgtttcctccaaagcctaaggacaccctgatgatcagcagaacccctgaagtgacctgcgtggtggtggatgtgtctcacgaggaccctgaagtgaagttcaattggtacgtggacggcgtggaagtgcacaacgccaagaccaagcctagagaggaacagtacaacagcacctacagagtggtgtccgtgctgaccgtgctgcaccaggattggctgaacggcaaagagtacaagtgcaaggtgtccaacaaggccctgcctgcccctatcgaaaagaccatcagcaaggccaagggccagcctagggaaccccaagtctgtacactgcctcctagccgcgaggaaatgaccaagaaccaggtgtccctgagctgcgccgtgaagggcttttacccttccgatatcgccgtggaatgggagagcaatggccagcctgagaacaactacaagacaacccctcctgtgctggacagcgacggctcattcttcctggtgtccaagctgacagtggacaagagcagatggcagcagggcaacgtgttcagctgctctgtgctgcacgaagccctgcacagccactacacccagaagtccctgtctctgagccccggcaagtgataa

SEQ ID NO: 229 - RNA, 1476 nt, synthetic construct
  source 1..1476: mol_type = other RNA
atggattggatttggagaatcctgttcctcgtgggcgccgctaccggagcccactcccaggtgcatctgacgcagtctgggcctgaggtgaggaagcctgggacctccgtaaaggtctcctgcaaggcccctggaaacacattgaagacttatgatctacactgggtgcgcagcgtccctggacaaggccttcagtggatgggatggataagccatgagggcgacaagaaggtcattgtggaaagattcaaggccaaagtcaccattgattgggacaggtccaccaatacggcctatctccaactgagcggcctcacatctggcgacacggccgtctattattgtgcgaaaggctcaaaacacaggctgcgagattacgctctctacgacgacgacggcgcattgaattgggctgtcgatgttgactacctttcgaacttggaattctggggccaagggaccgccgtcaccgtctcttcagcctctacaaagggccctagcgtgttccctctggctcctagcagcaagtcgacatctggcggaacagccgctctgggctgtctggtcaaggactactttcccgagcctgtgacagtgtcctggaactctggcgctctgacaagcggcgtgcacacatttccagccgtgctgcaaagcagcggcctgtactctctgagcagcgtggtcacagtgccaagctctagcctgggcacccagacctacatctgcaatgtgaaccacaagcctagcaacaccaaggtggacaagagagtggaacccaagagctgcgacaagacccacacctgtcctccatgtcctgctccagaactgctgggcggaccttccgtgttcctgtttcctccaaagcctaaggacaccctgatgatcagcagaacccctgaagtgacctgcgtggtggtggatgtgtctcacgaggaccctgaagtgaagttcaattggtacgtggacggcgtggaagtgcacaacgccaagaccaagcctagagaggaacagtacaacagcacctacagagtggtgtccgtgctgaccgtgctgcaccaggattggctgaacggcaaagagtacaagtgcaaggtgtccaacaaggccctgcctgcccctgaggaaaagaccatcagcaaggccaagggccagcctagggaaccccaagtctgtacactgcctcctagccgcgaggaaatgaccaagaaccaggtgtccctgagctgcgccgtgaagggcttttacccttccgatatcgccgtggaatgggagagcaatggccagcctgagaacaactacaagacaacccctcctgtgctggacagcgacggctcattcttcctggtgtccaagctgacagtggacaagagcagatggcagcagggcaacgtgttcagctgctctgtgctgcacgaagccctgcacagccactacacccagaagtccctgtctctgagccccggcaagtgataa

SEQ ID NO: 230 - RNA, 1476 nt, synthetic construct
  source 1..1476: mol_type = other RNA
atggattggatttggagaatcctgttcctcgtgggcgccgctaccggagcccactcccaggtgcatctgacgcagtctgggcctgaggtgaggaagcctgggacctccgtaaaggtctcctgcaaggcccctggaaacacattgaagacttatgatctacactgggtgcgcagcgtccctggacaaggccttcagtggatgggatggataagccatgagggcgacaagaaggtcattgtggaaagattcaaggccaaagtcaccattgattgggacaggtccaccaatacggcctatctccaactgagcggcctcacatctggcgacacggccgtctattattgtgcgaaaggctcaaaacacaggctgcgagattacgctctctacgacgacgacggcgcattgaattgggctgtcgatgttgactacctttcgaacttggaattctggggccaagggaccgccgtcaccgtctcttcagcctctacaaagggccctagcgtgttccctctggctcctagcagcaagtcgacatctggcggaacagccgctctgggctgtctggtcaaggactactttcccgagcctgtgacagtgtcctggaactctggcgctctgacaagcggcgtgcacacatttccagccgtgctgcaaagcagcggcctgtactctctgagcagcgtggtcacagtgccaagctctagcctgggcacccagacctacatctgcaatgtgaaccacaagcctagcaacaccaaggtggacaagagagtggaacccaagagctgcgacaagacccacacctgtcctccatgtcctgctccagaactgctggccggaccttccgtgttcctgtttcctccaaagcctaaggacaccctgatgatcagcagaacccctgaagtgacctgcgtggtggtggatgtgtctcacgaggaccccgaagtgaagttcaattggtacgtggacggcgtggaagtgcacaatgccaagaccaagcctagagaggaacagtacaacagcacctacagagtggtgtccgtgctgaccgtgctgcaccaggattggctgaacggcaaagagtacaagtgcaaggtgtccaacaaggccctgcctctgcctgaggaaaagaccatcagcaaggccaagggccagcctagggaaccccaggtttacaccctgcctccatgccgcgaggaaatgaccaagaaccaggtgtccctgtggtgcctcgtgaagggcttctacccttccgatatcgccgtggaatgggagagcaatggccagcctgagaacaactacaagacaacccctcctgtgctggacagcgacggctcattcttcctgtacagcaagctgaccgtggacaagtccagatggcagcagggcaacgtgttcagctgtagcgtgctgcacgaagccctgcacagccactacacccagaagtccctgtctctgagccccggcaagtgataa

SEQ ID NO: 231 - RNA, 1476 nt, synthetic construct
  source 1..1476: mol_type = other RNA
atggattggatttggagaatcctgttcctcgtgggcgccgctaccggagcccactcccaggtgcatctgacgcagtctgggcctgaggtgaggaagcctgggacctccgtaaaggtctcctgcaaggcccctggaaacacattgaagacttatgatctacactgggtgcgcagcgtccctggacaaggccttcagtggatgggatggataagccatgagggcgacaagaaggtcattgtggaaagattcaaggccaaagtcaccattgattgggacaggtccaccaatacggcctatctccaactgagcggcctcacatctggcgacacggccgtctattattgtgcgaaaggctcaaaacacaggctgcgagattacgctctctacgacgacgacggcgcattgaattgggctgtcgatgttgactacctttcgaacttggaattctggggccaagggaccgccgtcaccgtctcttcagcctctacaaagggccctagcgtgttccctctggctcctagcagcaagtcgacatctggcggaacagccgctctgggctgtctggtcaaggactactttcccgagcctgtgacagtgtcctggaactctggcgctctgacaagcggcgtgcacacatttccagccgtgctgcaaagcagcggcctgtactctctgagcagcgtggtcacagtgccaagctctagcctgggcacccagacctacatctgcaatgtgaaccacaagcctagcaacaccaaggtggacaagagagtggaacccaagagctgcgacaagacccacacctgtcctccatgtcctgctccagaactgctggccggaccttccgtgttcctgtttcctccaaagcctaaggacaccctgatgatcagcagaacccctgaagtgacctgcgtggtggtggatgtgtctcacgaggaccctgaagtgaagttcaattggtacgtggacggcgtggaagtgcacaacgccaagaccaagcctagagaggaacagtacaacagcacctacagagtggtgtccgtgctgaccgtgctgcaccaggattggctgaacggcaaagagtacaagtgcaaggtgtccaacaaggccctgcctgcccctgaggaaaagaccatcagcaaggccaagggccagcctagggaaccccaggtttacaccctgcctccatgccgcgaggaaatgaccaagaaccaggtgtccctgtggtgcctcgtgaagggcttctacccttccgatatcgccgtggaatgggagagcaatggccagcctgagaacaactacaagacaacccctcctgtgctggacagcgacggctcattcttcctgtacagcaagctgaccgtggacaagtccagatggcagcagggcaacgtgttcagctgtagcgtgctgcacgaagccctgcacagccactacacccagaagtccctgtctctgagccccggcaagtgataa

SEQ ID NO: 232 - RNA, 1476 nt, synthetic construct
  source 1..1476: mol_type = other RNA
atggattggatttggagaatcctgttcctcgtgggcgccgctaccggagcccactcccaggtgcatctgacgcagtctgggcctgaggtgaggaagcctgggacctccgtaaaggtctcctgcaaggcccctggaaacacattgaagacttatgatctacactgggtgcgcagcgtccctggacaaggccttcagtggatgggatggataagccatgagggcgacaagaaggtcattgtggaaagattcaaggccaaagtcaccattgattgggacaggtccaccaatacggcctatctccaactgagcggcctcacatctggcgacacggccgtctattattgtgcgaaaggctcaaaacacaggctgcgagattacgctctctacgacgacgacggcgcattgaattgggctgtcgatgttgactacctttcgaacttggaattctggggccaagggaccgccgtcaccgtctcttcagcctctacaaagggccctagcgtgttccctctggctcctagcagcaagtcgacatctggcggaacagccgctctgggctgtctggtcaaggactactttcccgagcctgtgacagtgtcctggaactctggcgctctgacaagcggcgtgcacacatttccagccgtgctgcaaagcagcggcctgtactctctgagcagcgtggtcacagtgccaagctctagcctgggcacccagacctacatctgcaatgtgaaccacaagcctagcaacaccaaggtggacaagagagtggaacccaagagctgcgacaagacccacacctgtcctccatgtcctgctccagaactgctggccggaccttccgtgttcctgtttcctccaaagcctaaggacaccctgatgatcagcagaacccctgaagtgacctgcgtggtggtggatgtgtctcacgaggaccctgaagtgaagttcaattggtacgtggacggcgtggaagtgcacaacgccaagaccaagcctagagaggaacagtacaacagcacctacagagtggtgtccgtgctgaccgtgctgcaccaggattggctgaacggcaaagagtacaagtgcaaggtgtccaacaaggccctgcctgcccctatcgaaaagaccatcagcaaggccaagggccagcctagggaaccccaggtttacaccctgcctccatgccgcgaggaaatgaccaagaaccaggtgtccctgtggtgcctcgtgaagggcttctacccttccgatatcgccgtggaatgggagagcaatggccagcctgagaacaactacaagacaacccctcctgtgctggacagcgacggctcattcttcctgtacagcaagctgaccgtggacaagtccagatggcagcagggcaacgtgttcagctgtagcgtgctgcacgaagccctgcacagccactacacccagaagtccctgtctctgagccccggcaagtgataa

SEQ ID NO: 233 - RNA, 1476 nt, synthetic construct
  source 1..1476: mol_type = other RNA
atggattggatttggagaatcctgttcctcgtgggcgccgctaccggagcccactcccaggtgcatctgacgcagtctgggcctgaggtgaggaagcctgggacctccgtaaaggtctcctgcaaggcccctggaaacacattgaagacttatgatctacactgggtgcgcagcgtccctggacaaggccttcagtggatgggatggataagccatgagggcgacaagaaggtcattgtggaaagattcaaggccaaagtcaccattgattgggacaggtccaccaatacggcctatctccaactgagcggcctcacatctggcgacacggccgtctattattgtgcgaaaggctcaaaacacaggctgcgagattacgctctctacgacgacgacggcgcattgaattgggctgtcgatgttgactacctttcgaacttggaattctggggccaagggaccgccgtcaccgtctcttcagcctctacaaagggccctagcgtgttccctctggctcctagcagcaagtcgacatctggcggaacagccgctctgggctgtctggtcaaggactactttcccgagcctgtgacagtgtcctggaactctggcgctctgacaagcggcgtgcacacatttccagccgtgctgcaaagcagcggcctgtactctctgagcagcgtggtcacagtgccaagctctagcctgggcacccagacctacatctgcaatgtgaaccacaagcctagcaacaccaaggtggacaagagagtggaacccaagagctgcgacaagacccacacctgtcctccatgtcctgctccagaactgctgggcggaccttccgtgttcctgtttcctccaaagcctaaggacaccctgatgatcagcagaacccctgaagtgacctgcgtggtggtggatgtgtctcacgaggaccctgaagtgaagttcaattggtacgtggacggcgtggaagtgcacaacgccaagaccaagcctagagaggaacagtacaacagcacctacagagtggtgtccgtgctgaccgtgctgcaccaggattggctgaacggcaaagagtacaagtgcaaggtgtccaacaaggccctgcctgcccctgaggaaaagaccatcagcaaggccaagggccagcctagggaaccccaggtttacaccctgcctccatgccgcgaggaaatgaccaagaaccaggtgtccctgtggtgcctcgtgaagggcttctacccttccgatatcgccgtggaatgggagagcaatggccagcctgagaacaactacaagacaacccctcctgtgctggacagcgacggctcattcttcctgtacagcaagctgaccgtggacaagtccagatggcagcagggcaacgtgttcagctgtagcgtgctgcacgaagccctgcacagccactacacccagaagtccctgtctctgagccccggcaagtgataa

SEQ ID NO: 234 - RNA, 1476 nt, synthetic construct
  source 1..1476: mol_type = other RNA
atggattggatttggagaatcctgttcctcgtgggcgccgctaccggagcccactcccaggtgcatctgacgcagtctgggcctgaggtgaggaagcctgggacctccgtaaaggtctcctgcaaggcccctggaaacacattgaagacttatgatctacactgggtgcgcagcgtccctggacaaggccttcagtggatgggatggataagccatgagggcgacaagaaggtcattgtggaaagattcaaggccaaagtcaccattgattgggacaggtccaccaatacggcctatctccaactgagcggcctcacatctggcgacacggccgtctattattgtgcgaaaggctcaaaacacaggctgcgagattacgctctctacgacgacgacggcgcattgaattgggctgtcgatgttgactacctttcgaacttggaattctggggccaagggaccgccgtcaccgtctcttcagcctctacaaagggccctagcgtgttccctctggctcctagcagcaagtcgacatctggcggaacagccgctctgggctgtctggtcaaggactactttcccgagcctgtgacagtgtcctggaactctggcgctctgacaagcggcgtgcacacatttccagccgtgctgcaaagcagcggcctgtactctctgagcagcgtggtcacagtgccaagctctagcctgggcacccagacctacatctgcaatgtgaaccacaagcctagcaacaccaaggtggacaagaaggtggaacccaagagctgcgacaagacccacacctgtcctccatgtcctgctccagaactgctcggcggaccttccgtgttcctgtttcctccaaagcctaaggacaccctgatgatcagcagaacccctgaagtgacctgcgtggtggtggatgtgtctcacgaggaccccgaagtgaagttcaattggtacgtggacggcgtggaagtgcacaacgccaagaccaagcctagagaggaacagtacaacagcacctacagagtggtgtccgtgctgacagtgctgcaccaggattggctgaacggcaaagagtacaagtgcaaggtgtccaacaaggccctgcctgctcctatcgagaaaaccatcagcaaggccaagggccagcctagggaaccccaggtttacacactgcctccaagccgcgaggaaatgaccaagaaccaggtgtccctgacctgcctcgtgaagggcttctacccttccgatatcgccgtggaatgggagagcaatggccagcctgagaacaactacaagacaacccctcctgtgctggacagcgacggctcattcttcctgtacagcaagctgactgtggataagtcccggtggcagcagggcaacgtgttcagctgttctgtgatgcacgaagccctgcacaaccactacacccagaaaagcctgtctctgagccccggcaagtgataa

SEQ ID NO: 235 - RNA, 1476 nt, synthetic construct
  source 1..1476: mol_type = other RNA
atggattggatttggagaatcctgttcctcgtgggcgccgctaccggagcccactcccaggtgcatctgacgcagtctgggcctgaggtgaggaagcctgggacctccgtaaaggtctcctgcaaggcccctggaaacacattgaagacttatgatctacactgggtgcgcagcgtccctggacaaggccttcagtggatgggatggataagccatgagggcgacaagaaggtcattgtggaaagattcaaggccaaagtcaccattgattgggacaggtccaccaatacggcctatctccaactgagcggcctcacatctggcgacacggccgtctattattgtgcgaaaggctcaaaacacaggctgcgagattacgctctctacgacgacgacggcgcattgaattgggctgtcgatgttgactacctttcgaacttggaattctggggccaagggaccgccgtcaccgtctcttcagcctctacaaagggccctagcgtgttccctctggctcctagcagcaagtcgacatctggcggaacagccgctctgggctgtctggtcaaggactactttcccgagcctgtgacagtgtcctggaactctggcgctctgacaagcggcgtgcacacatttccagccgtgctgcaaagcagcggcctgtactctctgagcagcgtggtcacagtgccaagctctagcctgggcacccagacctacatctgcaatgtgaaccacaagcctagcaacaccaaggtggacaagaaggtggaacccaagagctgcgacaagacccacacctgtcctccatgtcctgctccagaactgctcggcggaccttccgtgttcctgtttcctccaaagcctaaggacaccctgatgatcagcagaacccctgaagtgacctgcgtggtggtggatgtgtctcacgaggaccccgaagtgaagttcaattggtacgtggacggcgtggaagtgcacaacgccaagaccaagcctagagaggaacagtacaacagcacctacagagtggtgtccgtgctgacagtgctgcaccaggattggctgaacggcaaagagtacaagtgcaaggtgtccaacaaggccctgcctgctcctatcgagaaaaccatcagcaaggccaagggccagcctagggaaccccaggtttacacactgcctccaagccgcgaggaaatgaccaagaaccaggtgtccctgacctgcctcgtgaagggcttctacccttccgatatcgccgtggaatgggagagcaatggccagcctgagaacaactacaagacaacccctcctgtgctggacagcgacggctcattcttcctgtacagcaagctgaccgtggacaagtccagatggcagcagggcaacgtgttcagctgtagcgtgctgcacgaagccctgcacagccactacacccagaaaagcctgtctctgagccccggcaaatgataa

SEQ ID NO: 236 - RNA, 1476 nt, synthetic construct
  source 1..1476: mol_type = other RNA
atggattggatttggagaatcctgttcctcgtgggcgccgctaccggagcccactcccaggtgcatctgacgcagtctgggcctgaggtgaggaagcctgggacctccgtaaaggtctcctgcaaggcccctggaaacacattgaagacttatgatctacactgggtgcgcagcgtccctggacaaggccttcagtggatgggatggataagccatgagggcgacaagaaggtcattgtggaaagattcaaggccaaagtcaccattgattgggacaggtccaccaatacggcctatctccaactgagcggcctcacatctggcgacacggccgtctattattgtgcgaaaggctcaaaacacaggctgcgagattacgctctctacgacgacgacggcgcattgaattgggctgtcgatgttgactacctttcgaacttggaattctggggccaagggaccgccgtcaccgtctcttcagcctctacaaagggccctagcgtgttccctctggctcctagcagcaagtcgacatctggcggaacagccgctctgggctgtctggtcaaggactactttcccgagcctgtgacagtgtcctggaactctggcgctctgacaagcggcgtgcacacatttccagccgtgctgcaaagcagcggcctgtactctctgagcagcgtggtcacagtgccaagctctagcctgggcacccagacctacatctgcaatgtgaaccacaagcctagcaacaccaaggtggacaagaaggtggaacccaagagctgcgacaagacccacacctgtcctccatgtcctgctccagaactgctcggcggaccttccgtgttcctgtttcctccaaagcctaaggacaccctgatgatcagcagaacccctgaagtgacctgcgtggtggtggatgtgtctcacgaggaccccgaagtgaagttcaattggtacgtggacggcgtggaagtgcacaacgccaagaccaagcctagagaggaacagtacaacagcacctacagagtggtgtccgtgctgacagtgctgcaccaggattggctgaacggcaaagagtacaagtgcaaggtgtccaacaaggccctgcctgctcctatcgagaaaaccatcagcaaggccaagggccagcctagggaaccccaagtctgtacactgcctcctagccgcgaggaaatgaccaagaaccaggtgtccctgagctgcgccgtgaagggcttttacccttccgatatcgccgtggaatgggagagcaatggccagcctgagaacaactacaagacaacccctcctgtgctggacagcgacggctcattcttcctggtgtccaagctgacagtggacaagagcagatggcagcagggcaacgtgttcagctgctctgtgctgcacgaagccctgcacagccactacacccagaagtccctgtctctgagccccggcaagtgataa

SEQ ID NO: 237 - RNA, 1476 nt, synthetic construct
  source 1..1476: mol_type = other RNA
atggattggatttggagaatcctgttcctcgtgggcgccgctaccggagcccactcccaggtgcatctgacgcagtctgggcctgaggtgaggaagcctgggacctccgtaaaggtctcctgcaaggcccctggaaacacattgaagacttatgatctacactgggtgcgcagcgtccctggacaaggccttcagtggatgggatggataagccatgagggcgacaagaaggtcattgtggaaagattcaaggccaaagtcaccattgattgggacaggtccaccaatacggcctatctccaactgagcggcctcacatctggcgacacggccgtctattattgtgcgaaaggctcaaaacacaggctgcgagattacgctctctacgacgacgacggcgcattgaattgggctgtcgatgttgactacctttcgaacttggaattctggggccaagggaccgccgtcaccgtctcttcagcctctacaaagggccctagcgtgttccctctggctcctagcagcaagtcgacatctggcggaacagccgctctgggctgtctggtcaaggactactttcccgagcctgtgacagtgtcctggaactctggcgctctgacaagcggcgtgcacacatttccagccgtgctgcaaagcagcggcctgtactctctgagcagcgtggtcacagtgccaagctctagcctgggcacccagacctacatctgcaatgtgaaccacaagcctagcaacaccaaggtggacaagaaggtggaacccaagagctgcgacaagacccacacctgtcctccatgtcctgctccagaactgctcggcggaccttccgtgttcctgtttcctccaaagcctaaggacaccctgatgatcagcagaacccctgaagtgacctgcgtggtggtggatgtgtctcacgaggaccccgaagtgaagttcaattggtacgtggacggcgtggaagtgcacaacgccaagaccaagcctagagaggaacagtacaacagcacctacagagtggtgtccgtgctgacagtgctgcaccaggattggctgaacggcaaagagtacaagtgcaaggtgtccaacaaggccctgcctgctcctatcgagaaaaccatcagcaaggccaagggccagcctagggaaccccaggtttacaccctgcctccatgccgcgaggaaatgaccaagaaccaggtgtccctgtggtgcctcgtgaagggcttctacccttccgatatcgccgtggaatgggagagcaatggccagcctgagaacaactacaagacaacccctcctgtgctggacagcgacggctcattcttcctgtacagcaagctgaccgtggacaagtccagatggcagcagggcaacgtgttcagctgtagcgtgctgcacgaagccctgcacagccactacacccagaagtccctgtctctgagccccggcaagtgataa

SEQ ID NO: 238 - RNA, 1476 nt, synthetic construct
  source 1..1476: mol_type = other RNA
atggattggatttggagaatcctgttcctcgtgggcgccgctaccggagcccactcccaggtgcatctgacgcagtctgggcctgaggtgaggaagcctgggacctccgtaaaggtctcctgcaaggcccctggaaacacattgaagacttatgatctacactgggtgcgcagcgtccctggacaaggccttcagtggatgggatggataagccatgagggcgacaagaaggtcattgtggaaagattcaaggccaaagtcaccattgattgggacaggtccaccaatacggcctatctccaactgagcggcctcacatctggcgacacggccgtctattattgtgcgaaaggctcaaaacacaggctgcgagattacgctctctacgacgacgacggcgcattgaattgggctgtcgatgttgactacctttcgaacttggaattctggggccaagggaccgccgtcaccgtctcttcagcctctacaaagggccctagcgtgttccctctggctcctagcagcaagtcgacatctggcggaacagccgctctgggctgtctggtcaaggactactttcccgagcctgtgacagtgtcctggaactctggcgctctgacaagcggcgtgcacacatttccagccgtgctgcaaagcagcggcctgtactctctgagcagcgtggtcacagtgccaagctctagcctgggcacccagacctacatctgcaatgtgaaccacaagcctagcaacaccaaggtggacaagaaggtggaacccaagagctgcgacaagacccacacctgtcctccatgtcctgctccagaactgctggccggaccttccgtgttcctgtttcctccaaagcctaaggacaccctgatgatcagcagaacccctgaagtgacctgcgtggtggtggatgtgtctcacgaggaccccgaagtgaagttcaattggtacgtggacggcgtggaagtgcacaatgccaagaccaagcctagagaggaacagtacaacagcacctacagagtggtgtccgtgctgaccgtgctgcaccaggattggctgaacggcaaagagtacaagtgcaaggtgtccaacaaggccctgcctctgcctgaggaaaagaccatcagcaaggccaagggccagcctagggaaccccaggtttacacactgcctccaagccgcgaggaaatgaccaagaaccaggtgtccctgacctgcctcgtgaagggcttctacccttccgatatcgccgtggaatgggagagcaatggccagcctgagaacaactacaagacaacccctcctgtgctggacagcgacggctcattcttcctgtacagcaagctgaccgtggacaagtccagatggcagcagggcaacgtgttcagctgtagcgtgctgcacgaagccctgcacagccactacacccagaaaagcctgtctctgagccccggcaaatgataa

SEQ ID NO: 239 - RNA, 1476 nt, synthetic construct
  source 1..1476: mol_type = other RNA
atggattggatttggagaatcctgttcctcgtgggcgccgctaccggagcccactcccaggtgcatctgacgcagtctgggcctgaggtgaggaagcctgggacctccgtaaaggtctcctgcaaggcccctggaaacacattgaagacttatgatctacactgggtgcgcagcgtccctggacaaggccttcagtggatgggatggataagccatgagggcgacaagaaggtcattgtggaaagattcaaggccaaagtcaccattgattgggacaggtccaccaatacggcctatctccaactgagcggcctcacatctggcgacacggccgtctattattgtgcgaaaggctcaaaacacaggctgcgagattacgctctctacgacgacgacggcgcattgaattgggctgtcgatgttgactacctttcgaacttggaattctggggccaagggaccgccgtcaccgtctcttcagcctctacaaagggccctagcgtgttccctctggctcctagcagcaagtcgacatctggcggaacagccgctctgggctgtctggtcaaggactactttcccgagcctgtgacagtgtcctggaactctggcgctctgacaagcggcgtgcacacatttccagccgtgctgcaaagcagcggcctgtactctctgagcagcgtggtcacagtgccaagctctagcctgggcacccagacctacatctgcaatgtgaaccacaagcctagcaacaccaaggtggacaagaaggtggaacccaagagctgcgacaagacccacacctgtcctccatgtcctgctccagaactgctggccggaccttccgtgttcctgtttcctccaaagcctaaggacaccctgatgatcagcagaacccctgaagtgacctgcgtggtggtggatgtgtctcacgaggaccctgaagtgaagttcaattggtacgtggacggcgtggaagtgcacaacgccaagaccaagcctagagaggaacagtacaacagcacctacagagtggtgtccgtgctgaccgtgctgcaccaggattggctgaacggcaaagagtacaagtgcaaggtgtccaacaaggccctgcctgcccctgaggaaaagaccatcagcaaggccaagggccagcctagggaaccccaggtttacacactgcctccaagccgcgaggaaatgaccaagaaccaggtgtccctgacctgcctcgtgaagggcttctacccttccgatatcgccgtggaatgggagagcaatggccagcctgagaacaactacaagacaacccctcctgtgctggacagcgacggctcattcttcctgtacagcaagctgaccgtggacaagtccagatggcagcagggcaacgtgttcagctgtagcgtgctgcacgaagccctgcacagccactacacccagaaaagcctgtctctgagccccggcaaatgataa

SEQ ID NO: 240 - RNA, 1476 nt, synthetic construct
  source 1..1476: mol_type = other RNA
atggattggatttggagaatcctgttcctcgtgggcgccgctaccggagcccactcccaggtgcatctgacgcagtctgggcctgaggtgaggaagcctgggacctccgtaaaggtctcctgcaaggcccctggaaacacattgaagacttatgatctacactgggtgcgcagcgtccctggacaaggccttcagtggatgggatggataagccatgagggcgacaagaaggtcattgtggaaagattcaaggccaaagtcaccattgattgggacaggtccaccaatacggcctatctccaactgagcggcctcacatctggcgacacggccgtctattattgtgcgaaaggctcaaaacacaggctgcgagattacgctctctacgacgacgacggcgcattgaattgggctgtcgatgttgactacctttcgaacttggaattctggggccaagggaccgccgtcaccgtctcttcagcctctacaaagggccctagcgtgttccctctggctcctagcagcaagtcgacatctggcggaacagccgctctgggctgtctggtcaaggactactttcccgagcctgtgacagtgtcctggaactctggcgctctgacaagcggcgtgcacacatttccagccgtgctgcaaagcagcggcctgtactctctgagcagcgtggtcacagtgccaagctctagcctgggcacccagacctacatctgcaatgtgaaccacaagcctagcaacaccaaggtggacaagaaggtggaacccaagagctgcgacaagacccacacctgtcctccatgtcctgctccagaactgctggccggaccttccgtgttcctgtttcctccaaagcctaaggacaccctgatgatcagcagaacccctgaagtgacctgcgtggtggtggatgtgtctcacgaggaccctgaagtgaagttcaattggtacgtggacggcgtggaagtgcacaacgccaagaccaagcctagagaggaacagtacaacagcacctacagagtggtgtccgtgctgaccgtgctgcaccaggattggctgaacggcaaagagtacaagtgcaaggtgtccaacaaggccctgcctgcccctatcgaaaagaccatcagcaaggccaagggccagcctagggaaccccaggtttacacactgcctccaagccgcgaggaaatgaccaagaaccaggtgtccctgacctgcctcgtgaagggcttctacccttccgatatcgccgtggaatgggagagcaatggccagcctgagaacaactacaagacaacccctcctgtgctggacagcgacggctcattcttcctgtacagcaagctgaccgtggacaagtccagatggcagcagggcaacgtgttcagctgtagcgtgctgcacgaagccctgcacagccactacacccagaaaagcctgtctctgagccccggcaaatgataa

SEQ ID NO: 241 - RNA, 1476 nt, synthetic construct
  source 1..1476: mol_type = other RNA
atggattggatttggagaatcctgttcctcgtgggcgccgctaccggagcccactcccaggtgcatctgacgcagtctgggcctgaggtgaggaagcctgggacctccgtaaaggtctcctgcaaggcccctggaaacacattgaagacttatgatctacactgggtgcgcagcgtccctggacaaggccttcagtggatgggatggataagccatgagggcgacaagaaggtcattgtggaaagattcaaggccaaagtcaccattgattgggacaggtccaccaatacggcctatctccaactgagcggcctcacatctggcgacacggccgtctattattgtgcgaaaggctcaaaacacaggctgcgagattacgctctctacgacgacgacggcgcattgaattgggctgtcgatgttgactacctttcgaacttggaattctggggccaagggaccgccgtcaccgtctcttcagcctctacaaagggccctagcgtgttccctctggctcctagcagcaagtcgacatctggcggaacagccgctctgggctgtctggtcaaggactactttcccgagcctgtgacagtgtcctggaactctggcgctctgacaagcggcgtgcacacatttccagccgtgctgcaaagcagcggcctgtactctctgagcagcgtggtcacagtgccaagctctagcctgggcacccagacctacatctgcaatgtgaaccacaagcctagcaacaccaaggtggacaagaaggtggaacccaagagctgcgacaagacccacacctgtcctccatgtcctgctccagaactgctgggcggaccttccgtgttcctgtttcctccaaagcctaaggacaccctgatgatcagcagaacccctgaagtgacctgcgtggtggtggatgtgtctcacgaggaccctgaagtgaagttcaattggtacgtggacggcgtggaagtgcacaacgccaagaccaagcctagagaggaacagtacaacagcacctacagagtggtgtccgtgctgaccgtgctgcaccaggattggctgaacggcaaagagtacaagtgcaaggtgtccaacaaggccctgcctgcccctgaggaaaagaccatcagcaaggccaagggccagcctagggaaccccaggtttacacactgcctccaagccgcgaggaaatgaccaagaaccaggtgtccctgacctgcctcgtgaagggcttctacccttccgatatcgccgtggaatgggagagcaatggccagcctgagaacaactacaagacaacccctcctgtgctggacagcgacggctcattcttcctgtacagcaagctgaccgtggacaagtccagatggcagcagggcaacgtgttcagctgtagcgtgctgcacgaagccctgcacagccactacacccagaaaagcctgtctctgagccccggcaaatgataa

SEQ ID NO: 242 - RNA, 1476 nt, synthetic construct
  source 1..1476: mol_type = other RNA
atggattggatttggagaatcctgttcctcgtgggcgccgctaccggagcccactcccaggtgcatctgacgcagtctgggcctgaggtgaggaagcctgggacctccgtaaaggtctcctgcaaggcccctggaaacacattgaagacttatgatctacactgggtgcgcagcgtccctggacaaggccttcagtggatgggatggataagccatgagggcgacaagaaggtcattgtggaaagattcaaggccaaagtcaccattgattgggacaggtccaccaatacggcctatctccaactgagcggcctcacatctggcgacacggccgtctattattgtgcgaaaggctcaaaacacaggctgcgagattacgctctctacgacgacgacggcgcattgaattgggctgtcgatgttgactacctttcgaacttggaattctggggccaagggaccgccgtcaccgtctcttcagcctctacaaagggccctagcgtgttccctctggctcctagcagcaagtcgacatctggcggaacagccgctctgggctgtctggtcaaggactactttcccgagcctgtgacagtgtcctggaactctggcgctctgacaagcggcgtgcacacatttccagccgtgctgcaaagcagcggcctgtactctctgagcagcgtggtcacagtgccaagctctagcctgggcacccagacctacatctgcaatgtgaaccacaagcctagcaacaccaaggtggacaagaaggtggaacccaagagctgcgacaagacccacacctgtcctccatgtcctgctccagaactgctggccggaccttccgtgttcctgtttcctccaaagcctaaggacaccctgatgatcagcagaacccctgaagtgacctgcgtggtggtggatgtgtctcacgaggaccccgaagtgaagttcaattggtacgtggacggcgtggaagtgcacaatgccaagaccaagcctagagaggaacagtacaacagcacctacagagtggtgtccgtgctgaccgtgctgcaccaggattggctgaacggcaaagagtacaagtgcaaggtgtccaacaaggccctgcctctgcctgaggaaaagaccatcagcaaggccaagggccagcctagggaaccccaagtctgtacactgcctcctagccgcgaggaaatgaccaagaaccaggtgtccctgagctgcgccgtgaagggcttttacccttccgatatcgccgtggaatgggagagcaatggccagcctgagaacaactacaagacaacccctcctgtgctggacagcgacggctcattcttcctggtgtccaagctgacagtggacaagagcagatggcagcagggcaacgtgttcagctgctctgtgctgcacgaagccctgcacagccactacacccagaagtccctgtctctgagccccggcaagtgataa

SEQ ID NO: 243 - RNA, 1476 nt, synthetic construct
  source 1..1476: mol_type = other RNA
atggattggatttggagaatcctgttcctcgtgggcgccgctaccggagcccactcccaggtgcatctgacgcagtctgggcctgaggtgaggaagcctgggacctccgtaaaggtctcctgcaaggcccctggaaacacattgaagacttatgatctacactgggtgcgcagcgtccctggacaaggccttcagtggatgggatggataagccatgagggcgacaagaaggtcattgtggaaagattcaaggccaaagtcaccattgattgggacaggtccaccaatacggcctatctccaactgagcggcctcacatctggcgacacggccgtctattattgtgcgaaaggctcaaaacacaggctgcgagattacgctctctacgacgacgacggcgcattgaattgggctgtcgatgttgactacctttcgaacttggaattctggggccaagggaccgccgtcaccgtctcttcagcctctacaaagggccctagcgtgttccctctggctcctagcagcaagtcgacatctggcggaacagccgctctgggctgtctggtcaaggactactttcccgagcctgtgacagtgtcctggaactctggcgctctgacaagcggcgtgcacacatttccagccgtgctgcaaagcagcggcctgtactctctgagcagcgtggtcacagtgccaagctctagcctgggcacccagacctacatctgcaatgtgaaccacaagcctagcaacaccaaggtggacaagaaggtggaacccaagagctgcgacaagacccacacctgtcctccatgtcctgctccagaactgctggccggaccttccgtgttcctgtttcctccaaagcctaaggacaccctgatgatcagcagaacccctgaagtgacctgcgtggtggtggatgtgtctcacgaggaccctgaagtgaagttcaattggtacgtggacggcgtggaagtgcacaacgccaagaccaagcctagagaggaacagtacaacagcacctacagagtggtgtccgtgctgaccgtgctgcaccaggattggctgaacggcaaagagtacaagtgcaaggtgtccaacaaggccctgcctgcccctgaggaaaagaccatcagcaaggccaagggccagcctagggaaccccaagtctgtacactgcctcctagccgcgaggaaatgaccaagaaccaggtgtccctgagctgcgccgtgaagggcttttacccttccgatatcgccgtggaatgggagagcaatggccagcctgagaacaactacaagacaacccctcctgtgctggacagcgacggctcattcttcctggtgtccaagctgacagtggacaagagcagatggcagcagggcaacgtgttcagctgctctgtgctgcacgaagccctgcacagccactacacccagaagtccctgtctctgagccccggcaagtgataa

SEQ ID NO: 244 - RNA, 1476 nt, synthetic construct
  source 1..1476: mol_type = other RNA
atggattggatttggagaatcctgttcctcgtgggcgccgctaccggagcccactcccaggtgcatctgacgcagtctgggcctgaggtgaggaagcctgggacctccgtaaaggtctcctgcaaggcccctggaaacacattgaagacttatgatctacactgggtgcgcagcgtccctggacaaggccttcagtggatgggatggataagccatgagggcgacaagaaggtcattgtggaaagattcaaggccaaagtcaccattgattgggacaggtccaccaatacggcctatctccaactgagcggcctcacatctggcgacacggccgtctattattgtgcgaaaggctcaaaacacaggctgcgagattacgctctctacgacgacgacggcgcattgaattgggctgtcgatgttgactacctttcgaacttggaattctggggccaagggaccgccgtcaccgtctcttcagcctctacaaagggccctagcgtgttccctctggctcctagcagcaagtcgacatctggcggaacagccgctctgggctgtctggtcaaggactactttcccgagcctgtgacagtgtcctggaactctggcgctctgacaagcggcgtgcacacatttccagccgtgctgcaaagcagcggcctgtactctctgagcagcgtggtcacagtgccaagctctagcctgggcacccagacctacatctgcaatgtgaaccacaagcctagcaacaccaaggtggacaagaaggtggaacccaagagctgcgacaagacccacacctgtcctccatgtcctgctccagaactgctggccggaccttccgtgttcctgtttcctccaaagcctaaggacaccctgatgatcagcagaacccctgaagtgacctgcgtggtggtggatgtgtctcacgaggaccctgaagtgaagttcaattggtacgtggacggcgtggaagtgcacaacgccaagaccaagcctagagaggaacagtacaacagcacctacagagtggtgtccgtgctgaccgtgctgcaccaggattggctgaacggcaaagagtacaagtgcaaggtgtccaacaaggccctgcctgcccctatcgaaaagaccatcagcaaggccaagggccagcctagggaaccccaagtctgtacactgcctcctagccgcgaggaaatgaccaagaaccaggtgtccctgagctgcgccgtgaagggcttttacccttccgatatcgccgtggaatgggagagcaatggccagcctgagaacaactacaagacaacccctcctgtgctggacagcgacggctcattcttcctggtgtccaagctgacagtggacaagagcagatggcagcagggcaacgtgttcagctgctctgtgctgcacgaagccctgcacagccactacacccagaagtccctgtctctgagccccggcaagtgataa

SEQ ID NO: 245 - RNA, 1476 nt, synthetic construct
  source 1..1476: mol_type = other RNA
atggattggatttggagaatcctgttcctcgtgggcgccgctaccggagcccactcccaggtgcatctgacgcagtctgggcctgaggtgaggaagcctgggacctccgtaaaggtctcctgcaaggcccctggaaacacattgaagacttatgatctacactgggtgcgcagcgtccctggacaaggccttcagtggatgggatggataagccatgagggcgacaagaaggtcattgtggaaagattcaaggccaaagtcaccattgattgggacaggtccaccaatacggcctatctccaactgagcggcctcacatctggcgacacggccgtctattattgtgcgaaaggctcaaaacacaggctgcgagattacgctctctacgacgacgacggcgcattgaattgggctgtcgatgttgactacctttcgaacttggaattctggggccaagggaccgccgtcaccgtctcttcagcctctacaaagggccctagcgtgttccctctggctcctagcagcaagtcgacatctggcggaacagccgctctgggctgtctggtcaaggactactttcccgagcctgtgacagtgtcctggaactctggcgctctgacaagcggcgtgcacacatttccagccgtgctgcaaagcagcggcctgtactctctgagcagcgtggtcacagtgccaagctctagcctgggcacccagacctacatctgcaatgtgaaccacaagcctagcaacaccaaggtggacaagaaggtggaacccaagagctgcgacaagacccacacctgtcctccatgtcctgctccagaactgctgggcggaccttccgtgttcctgtttcctccaaagcctaaggacaccctgatgatcagcagaacccctgaagtgacctgcgtggtggtggatgtgtctcacgaggaccctgaagtgaagttcaattggtacgtggacggcgtggaagtgcacaacgccaagaccaagcctagagaggaacagtacaacagcacctacagagtggtgtccgtgctgaccgtgctgcaccaggattggctgaacggcaaagagtacaagtgcaaggtgtccaacaaggccctgcctgcccctgaggaaaagaccatcagcaaggccaagggccagcctagggaaccccaagtctgtacactgcctcctagccgcgaggaaatgaccaagaaccaggtgtccctgagctgcgccgtgaagggcttttacccttccgatatcgccgtggaatgggagagcaatggccagcctgagaacaactacaagacaacccctcctgtgctggacagcgacggctcattcttcctggtgtccaagctgacagtggacaagagcagatggcagcagggcaacgtgttcagctgctctgtgctgcacgaagccctgcacagccactacacccagaagtccctgtctctgagccccggcaagtgataa

SEQ ID NO: 246 - RNA, 1476 nt, synthetic construct
  source 1..1476: mol_type = other RNA
atggattggatttggagaatcctgttcctcgtgggcgccgctaccggagcccactcccaggtgcatctgacgcagtctgggcctgaggtgaggaagcctgggacctccgtaaaggtctcctgcaaggcccctggaaacacattgaagacttatgatctacactgggtgcgcagcgtccctggacaaggccttcagtggatgggatggataagccatgagggcgacaagaaggtcattgtggaaagattcaaggccaaagtcaccattgattgggacaggtccaccaatacggcctatctccaactgagcggcctcacatctggcgacacggccgtctattattgtgcgaaaggctcaaaacacaggctgcgagattacgctctctacgacgacgacggcgcattgaattgggctgtcgatgttgactacctttcgaacttggaattctggggccaagggaccgccgtcaccgtctcttcagcctctacaaagggccctagcgtgttccctctggctcctagcagcaagtcgacatctggcggaacagccgctctgggctgtctggtcaaggactactttcccgagcctgtgacagtgtcctggaactctggcgctctgacaagcggcgtgcacacatttccagccgtgctgcaaagcagcggcctgtactctctgagcagcgtggtcacagtgccaagctctagcctgggcacccagacctacatctgcaatgtgaaccacaagcctagcaacaccaaggtggacaagaaggtggaacccaagagctgcgacaagacccacacctgtcctccatgtcctgctccagaactgctggccggaccttccgtgttcctgtttcctccaaagcctaaggacaccctgatgatcagcagaacccctgaagtgacctgcgtggtggtggatgtgtctcacgaggaccccgaagtgaagttcaattggtacgtggacggcgtggaagtgcacaatgccaagaccaagcctagagaggaacagtacaacagcacctacagagtggtgtccgtgctgaccgtgctgcaccaggattggctgaacggcaaagagtacaagtgcaaggtgtccaacaaggccctgcctctgcctgaggaaaagaccatcagcaaggccaagggccagcctagggaaccccaggtttacaccctgcctccatgccgcgaggaaatgaccaagaaccaggtgtccctgtggtgcctcgtgaagggcttctacccttccgatatcgccgtggaatgggagagcaatggccagcctgagaacaactacaagacaacccctcctgtgctggacagcgacggctcattcttcctgtacagcaagctgaccgtggacaagtccagatggcagcagggcaacgtgttcagctgtagcgtgctgcacgaagccctgcacagccactacacccagaagtccctgtctctgagccccggcaagtgataa

SEQ ID NO: 247 - RNA, 1476 nt, synthetic construct
  source 1..1476: mol_type = other RNA
atggattggatttggagaatcctgttcctcgtgggcgccgctaccggagcccactcccaggtgcatctgacgcagtctgggcctgaggtgaggaagcctgggacctccgtaaaggtctcctgcaaggcccctggaaacacattgaagacttatgatctacactgggtgcgcagcgtccctggacaaggccttcagtggatgggatggataagccatgagggcgacaagaaggtcattgtggaaagattcaaggccaaagtcaccattgattgggacaggtccaccaatacggcctatctccaactgagcggcctcacatctggcgacacggccgtctattattgtgcgaaaggctcaaaacacaggctgcgagattacgctctctacgacgacgacggcgcattgaattgggctgtcgatgttgactacctttcgaacttggaattctggggccaagggaccgccgtcaccgtctcttcagcctctacaaagggccctagcgtgttccctctggctcctagcagcaagtcgacatctggcggaacagccgctctgggctgtctggtcaaggactactttcccgagcctgtgacagtgtcctggaactctggcgctctgacaagcggcgtgcacacatttccagccgtgctgcaaagcagcggcctgtactctctgagcagcgtggtcacagtgccaagctctagcctgggcacccagacctacatctgcaatgtgaaccacaagcctagcaacaccaaggtggacaagaaggtggaacccaagagctgcgacaagacccacacctgtcctccatgtcctgctccagaactgctggccggaccttccgtgttcctgtttcctccaaagcctaaggacaccctgatgatcagcagaacccctgaagtgacctgcgtggtggtggatgtgtctcacgaggaccctgaagtgaagttcaattggtacgtggacggcgtggaagtgcacaacgccaagaccaagcctagagaggaacagtacaacagcacctacagagtggtgtccgtgctgaccgtgctgcaccaggattggctgaacggcaaagagtacaagtgcaaggtgtccaacaaggccctgcctgcccctgaggaaaagaccatcagcaaggccaagggccagcctagggaaccccaggtttacaccctgcctccatgccgcgaggaaatgaccaagaaccaggtgtccctgtggtgcctcgtgaagggcttctacccttccgatatcgccgtggaatgggagagcaatggccagcctgagaacaactacaagacaacccctcctgtgctggacagcgacggctcattcttcctgtacagcaagctgaccgtggacaagtccagatggcagcagggcaacgtgttcagctgtagcgtgctgcacgaagccctgcacagccactacacccagaagtccctgtctctgagccccggcaagtgataa

SEQ ID NO: 248 - RNA, 1476 nt, synthetic construct
  source 1..1476: mol_type = other RNA
atggattggatttggagaatcctgttcctcgtgggcgccgctaccggagcccactcccaggtgcatctgacgcagtctgggcctgaggtgaggaagcctgggacctccgtaaaggtctcctgcaaggcccctggaaacacattgaagacttatgatctacactgggtgcgcagcgtccctggacaaggccttcagtggatgggatggataagccatgagggcgacaagaaggtcattgtggaaagattcaaggccaaagtcaccattgattgggacaggtccaccaatacggcctatctccaactgagcggcctcacatctggcgacacggccgtctattattgtgcgaaaggctcaaaacacaggctgcgagattacgctctctacgacgacgacggcgcattgaattgggctgtcgatgttgactacctttcgaacttggaattctggggccaagggaccgccgtcaccgtctcttcagcctctacaaagggccctagcgtgttccctctggctcctagcagcaagtcgacatctggcggaacagccgctctgggctgtctggtcaaggactactttcccgagcctgtgacagtgtcctggaactctggcgctctgacaagcggcgtgcacacatttccagccgtgctgcaaagcagcggcctgtactctctgagcagcgtggtcacagtgccaagctctagcctgggcacccagacctacatctgcaatgtgaaccacaagcctagcaacaccaaggtggacaagaaggtggaacccaagagctgcgacaagacccacacctgtcctccatgtcctgctccagaactgctggccggaccttccgtgttcctgtttcctccaaagcctaaggacaccctgatgatcagcagaacccctgaagtgacctgcgtggtggtggatgtgtctcacgaggaccctgaagtgaagttcaattggtacgtggacggcgtggaagtgcacaacgccaagaccaagcctagagaggaacagtacaacagcacctacagagtggtgtccgtgctgaccgtgctgcaccaggattggctgaacggcaaagagtacaagtgcaaggtgtccaacaaggccctgcctgcccctatcgaaaagaccatcagcaaggccaagggccagcctagggaaccccaggtttacaccctgcctccatgccgcgaggaaatgaccaagaaccaggtgtccctgtggtgcctcgtgaagggcttctacccttccgatatcgccgtggaatgggagagcaatggccagcctgagaacaactacaagacaacccctcctgtgctggacagcgacggctcattcttcctgtacagcaagctgaccgtggacaagtccagatggcagcagggcaacgtgttcagctgtagcgtgctgcacgaagccctgcacagccactacacccagaagtccctgtctctgagccccggcaagtgataa

SEQ ID NO: 249 - RNA, 1476 nt, synthetic construct
  source 1..1476: mol_type = other RNA
atggattggatttggagaatcctgttcctcgtgggcgccgctaccggagcccactcccaggtgcatctgacgcagtctgggcctgaggtgaggaagcctgggacctccgtaaaggtctcctgcaaggcccctggaaacacattgaagacttatgatctacactgggtgcgcagcgtccctggacaaggccttcagtggatgggatggataagccatgagggcgacaagaaggtcattgtggaaagattcaaggccaaagtcaccattgattgggacaggtccaccaatacggcctatctccaactgagcggcctcacatctggcgacacggccgtctattattgtgcgaaaggctcaaaacacaggctgcgagattacgctctctacgacgacgacggcgcattgaattgggctgtcgatgttgactacctttcgaacttggaattctggggccaagggaccgccgtcaccgtctcttcagcctctacaaagggccctagcgtgttccctctggctcctagcagcaagtcgacatctggcggaacagccgctctgggctgtctggtcaaggactactttcccgagcctgtgacagtgtcctggaactctggcgctctgacaagcggcgtgcacacatttccagccgtgctgcaaagcagcggcctgtactctctgagcagcgtggtcacagtgccaagctctagcctgggcacccagacctacatctgcaatgtgaaccacaagcctagcaacaccaaggtggacaagaaggtggaacccaagagctgcgacaagacccacacctgtcctccatgtcctgctccagaactgctgggcggaccttccgtgttcctgtttcctccaaagcctaaggacaccctgatgatcagcagaacccctgaagtgacctgcgtggtggtggatgtgtctcacgaggaccctgaagtgaagttcaattggtacgtggacggcgtggaagtgcacaacgccaagaccaagcctagagaggaacagtacaacagcacctacagagtggtgtccgtgctgaccgtgctgcaccaggattggctgaacggcaaagagtacaagtgcaaggtgtccaacaaggccctgcctgcccctgaggaaaagaccatcagcaaggccaagggccagcctagggaaccccaggtttacaccctgcctccatgccgcgaggaaatgaccaagaaccaggtgtccctgtggtgcctcgtgaagggcttctacccttccgatatcgccgtggaatgggagagcaatggccagcctgagaacaactacaagacaacccctcctgtgctggacagcgacggctcattcttcctgtacagcaagctgaccgtggacaagtccagatggcagcagggcaacgtgttcagctgtagcgtgctgcacgaagccctgcacagccactacacccagaagtccctgtctctgagccccggcaagtgataa

SEQ ID NO: 250 - RNA, 1476 nt, synthetic construct
  source 1..1476: mol_type = other RNA
atggattggatttggagaatcctgttcctcgtgggcgccgctaccggagcccactcccaggtgcatctgacgcagtctgggcctgaggtgaggaagcctgggacctccgtaaaggtctcctgcaaggcccctggaaacacattgaagacttatgatctacactgggtgcgcagcgtccctggacaaggccttcagtggatgggatggataagccatgagggcgacaagaaggtcattgtggaaagattcaaggccaaagtcaccattgattgggacaggtccaccaatacggcctatctccaactgagcggcctcacatctggcgacacggccgtctattattgtgcgaaaggctcaaaacacaggctgcgagattacgctctctacgacgacgacggcgcattgaattgggctgtcgatgttgactacctttcgaacttggaattctggggccaagggaccgccgtcaccgtctcttcagcctctacaaagggccctagcgtgttccctctggctcctagcagcaagtcgacatctggcggaacagccgctctgggctgtctggtcaaggactactttcccgagcctgtgacagtgtcctggaactctggcgctctgacaagcggcgtgcacacatttccagccgtgctgcaaagcagcggcctgtactctctgagcagcgtggtcacagtgccaagctctagcctgggcacccagacctacatctgcaatgtgaaccacaagcctagcaacaccaaggtggacaagaaggtggaacccaagagctgcgacaagacccacacctgtcctccatgtcctgctccagaactgctcggcggaccttccgtgttcctgtttcctccaaagcctaaggacaccctgatgatcagcagaacccctgaagtgacctgcgtggtggtggatgtgtctcacgaggaccccgaagtgaagttcaattggtacgtggacggcgtggaagtgcacaacgccaagaccaagcctagagaggaacagtacaacagcacctacagagtggtgtccgtgctgacagtgctgcaccaggattggctgaacggcaaagagtacaagtgcaaggtgtccaacaaggccctgcctgctcctatcgagaaaaccatcagcaaggccaagggccagcctagggaaccccaggtttacacactgcctccaagccgcgacgaactgaccaagaaccaggtgtccctgacctgcctcgtgaagggcttctacccttccgatatcgccgtggaatgggagagcaatggccagcctgagaacaactacaagacaacccctcctgtgctggacagcgacggctcattcttcctgtacagcaagctgactgtggataagtcccggtggcagcagggcaacgtgttcagctgttctgtgatgcacgaagccctgcacaaccactacacccagaaaagcctgtctctgagccccggcaagtgataa

SEQ ID NO: 251 - RNA, 1476 nt, synthetic construct
  source 1..1476: mol_type = other RNA
atggattggatttggagaatcctgttcctcgtgggcgccgctaccggagcccactcccaggtgcatctgacgcagtctgggcctgaggtgaggaagcctgggacctccgtaaaggtctcctgcaaggcccctggaaacacattgaagacttatgatctacactgggtgcgcagcgtccctggacaaggccttcagtggatgggatggataagccatgagggcgacaagaaggtcattgtggaaagattcaaggccaaagtcaccattgattgggacaggtccaccaatacggcctatctccaactgagcggcctcacatctggcgacacggccgtctattattgtgcgaaaggctcaaaacacaggctgcgagattacgctctctacgacgacgacggcgcattgaattgggctgtcgatgttgactacctttcgaacttggaattctggggccaagggaccgccgtcaccgtctcttcagcctctacaaagggccctagcgtgttccctctggctcctagcagcaagtcgacatctggcggaacagccgctctgggctgtctggtcaaggactactttcccgagcctgtgacagtgtcctggaactctggcgctctgacaagcggcgtgcacacatttccagccgtgctgcaaagcagcggcctgtactctctgagcagcgtggtcacagtgccaagctctagcctgggcacccagacctacatctgcaatgtgaaccacaagcctagcaacaccaaggtggacaagaaggtggaacccaagagctgcgacaagacccacacctgtcctccatgtcctgctccagaactgctcggcggaccttccgtgttcctgtttcctccaaagcctaaggacaccctgatgatcagcagaacccctgaagtgacctgcgtggtggtggatgtgtctcacgaggaccccgaagtgaagttcaattggtacgtggacggcgtggaagtgcacaacgccaagaccaagcctagagaggaacagtacaacagcacctacagagtggtgtccgtgctgacagtgctgcaccaggattggctgaacggcaaagagtacaagtgcaaggtgtccaacaaggccctgcctgctcctatcgagaaaaccatcagcaaggccaagggccagcctagggaaccccaggtttacacactgcctccaagccgcgacgaactgaccaagaaccaggtgtccctgacctgcctcgtgaagggcttctacccttccgatatcgccgtggaatgggagagcaatggccagcctgagaacaactacaagacaacccctcctgtgctggacagcgacggctcattcttcctgtacagcaagctgaccgtggacaagtccagatggcagcagggcaacgtgttcagctgtagcgtgctgcacgaagccctgcacagccactacacccagaaaagcctgtctctgagccccggcaaatgataa

SEQ ID NO: 252 - RNA, 1476 nt, synthetic construct
  source 1..1476: mol_type = other RNA
atggattggatttggagaatcctgttcctcgtgggcgccgctaccggagcccactcccaggtgcatctgacgcagtctgggcctgaggtgaggaagcctgggacctccgtaaaggtctcctgcaaggcccctggaaacacattgaagacttatgatctacactgggtgcgcagcgtccctggacaaggccttcagtggatgggatggataagccatgagggcgacaagaaggtcattgtggaaagattcaaggccaaagtcaccattgattgggacaggtccaccaatacggcctatctccaactgagcggcctcacatctggcgacacggccgtctattattgtgcgaaaggctcaaaacacaggctgcgagattacgctctctacgacgacgacggcgcattgaattgggctgtcgatgttgactacctttcgaacttggaattctggggccaagggaccgccgtcaccgtctcttcagcctctacaaagggccctagcgtgttccctctggctcctagcagcaagtcgacatctggcggaacagccgctctgggctgtctggtcaaggactactttcccgagcctgtgacagtgtcctggaactctggcgctctgacaagcggcgtgcacacatttccagccgtgctgcaaagcagcggcctgtactctctgagcagcgtggtcacagtgccaagctctagcctgggcacccagacctacatctgcaatgtgaaccacaagcctagcaacaccaaggtggacaagaaggtggaacccaagagctgcgacaagacccacacctgtcctccatgtcctgctccagaactgctcggcggaccttccgtgttcctgtttcctccaaagcctaaggacaccctgatgatcagcagaacccctgaagtgacctgcgtggtggtggatgtgtctcacgaggaccccgaagtgaagttcaattggtacgtggacggcgtggaagtgcacaacgccaagaccaagcctagagaggaacagtacaacagcacctacagagtggtgtccgtgctgacagtgctgcaccaggattggctgaacggcaaagagtacaagtgcaaggtgtccaacaaggccctgcctgctcctatcgagaaaaccatcagcaaggccaagggccagcctcgcgaacctcaagtctgtacactgcctcctagccgcgacgaactgaccaagaaccaggtgtccctgagctgcgccgtgaagggcttttacccttccgatatcgccgtggaatgggagagcaatggccagcctgagaacaactacaagacaacccctcctgtgctggacagcgacggctcattcttcctggtgtccaagctgacagtggacaagagcagatggcagcagggcaacgtgttcagctgcagcgtgctgcatgaagccctgcacagccactacacccagaagtccctgtctctgagccccggcaagtgataa

SEQ ID NO: 253 - RNA, 1476 nt, synthetic construct
  source 1..1476: mol_type = other RNA
atggattggatttggagaatcctgttcctcgtgggcgccgctaccggagcccactcccaggtgcatctgacgcagtctgggcctgaggtgaggaagcctgggacctccgtaaaggtctcctgcaaggcccctggaaacacattgaagacttatgatctacactgggtgcgcagcgtccctggacaaggccttcagtggatgggatggataagccatgagggcgacaagaaggtcattgtggaaagattcaaggccaaagtcaccattgattgggacaggtccaccaatacggcctatctccaactgagcggcctcacatctggcgacacggccgtctattattgtgcgaaaggctcaaaacacaggctgcgagattacgctctctacgacgacgacggcgcattgaattgggctgtcgatgttgactacctttcgaacttggaattctggggccaagggaccgccgtcaccgtctcttcagcctctacaaagggccctagcgtgttccctctggctcctagcagcaagtcgacatctggcggaacagccgctctgggctgtctggtcaaggactactttcccgagcctgtgacagtgtcctggaactctggcgctctgacaagcggcgtgcacacatttccagccgtgctgcaaagcagcggcctgtactctctgagcagcgtggtcacagtgccaagctctagcctgggcacccagacctacatctgcaatgtgaaccacaagcctagcaacaccaaggtggacaagaaggtggaacccaagagctgcgacaagacccacacctgtcctccatgtcctgctccagaactgctcggcggaccttccgtgttcctgtttcctccaaagcctaaggacaccctgatgatcagcagaacccctgaagtgacctgcgtggtggtggatgtgtctcacgaggaccccgaagtgaagttcaattggtacgtggacggcgtggaagtgcacaacgccaagaccaagcctagagaggaacagtacaacagcacctacagagtggtgtccgtgctgacagtgctgcaccaggattggctgaacggcaaagagtacaagtgcaaggtgtccaacaaggccctgcctgctcctatcgagaaaaccatcagcaaggccaagggccagcctagggaaccccaggtttacaccctgcctccatgccgcgacgaactgaccaagaaccaggtgtccctgtggtgcctggtcaagggcttctacccttccgatatcgccgtggaatgggagagcaatggccagcctgagaacaactacaagacaacccctcctgtgctggacagcgacggctcattcttcctgtacagcaagctgacagtggacaagagcagatggcagcagggcaacgtgttcagctgcagcgtgctgcatgaagccctgcacagccactacacccagaagtccctgtctctgagccccggcaagtgataa

SEQ ID NO: 254 - RNA, 1476 nt, synthetic construct
  source 1..1476: mol_type = other RNA
atggattggatttggagaatcctgttcctcgtgggcgccgctaccggagcccactcccaggtgcatctgacgcagtctgggcctgaggtgaggaagcctgggacctccgtaaaggtctcctgcaaggcccctggaaacacattgaagacttatgatctacactgggtgcgcagcgtccctggacaaggccttcagtggatgggatggataagccatgagggcgacaagaaggtcattgtggaaagattcaaggccaaagtcaccattgattgggacaggtccaccaatacggcctatctccaactgagcggcctcacatctggcgacacggccgtctattattgtgcgaaaggctcaaaacacaggctgcgagattacgctctctacgacgacgacggcgcattgaattgggctgtcgatgttgactacctttcgaacttggaattctggggccaagggaccgccgtcaccgtctcttcagcctctacaaagggccctagcgtgttccctctggctcctagcagcaagtcgacatctggcggaacagccgctctgggctgtctggtcaaggactactttcccgagcctgtgacagtgtcctggaactctggcgctctgacaagcggcgtgcacacatttccagccgtgctgcaaagcagcggcctgtactctctgagcagcgtggtcacagtgccaagctctagcctgggcacccagacctacatctgcaatgtgaaccacaagcctagcaacaccaaggtggacaagaaggtggaacccaagagctgcgacaagacccacacctgtcctccatgtcctgctccagaactgctggccggaccttccgtgttcctgtttcctccaaagcctaaggacaccctgatgatcagcagaacccctgaagtgacctgcgtggtggtggatgtgtctcacgaggaccccgaagtgaagttcaattggtacgtggacggcgtggaagtgcacaatgccaagaccaagcctagagaggaacagtacaacagcacctacagagtggtgtccgtgctgaccgtgctgcaccaggattggctgaacggcaaagagtacaagtgcaaggtgtccaacaaggccctgcctctgcctgaggaaaagaccatcagcaaggccaagggccagcctagggaaccccaggtttacacactgcctccaagccgcgacgaactgaccaagaaccaggtgtccctgacctgcctcgtgaagggcttctacccttccgatatcgccgtggaatgggagagcaatggccagcctgagaacaactacaagacaacccctcctgtgctggacagcgacggctcattcttcctgtacagcaagctgaccgtggacaagtccagatggcagcagggcaacgtgttcagctgtagcgtgctgcacgaagccctgcacagccactacacccagaaaagcctgtctctgagccccggcaaatgataa

SEQ ID NO: 255 - RNA, 1476 nt, synthetic construct
  source 1..1476: mol_type = other RNA
atggattggatttggagaatcctgttcctcgtgggcgccgctaccggagcccactcccaggtgcatctgacgcagtctgggcctgaggtgaggaagcctgggacctccgtaaaggtctcctgcaaggcccctggaaacacattgaagacttatgatctacactgggtgcgcagcgtccctggacaaggccttcagtggatgggatggataagccatgagggcgacaagaaggtcattgtggaaagattcaaggccaaagtcaccattgattgggacaggtccaccaatacggcctatctccaactgagcggcctcacatctggcgacacggccgtctattattgtgcgaaaggctcaaaacacaggctgcgagattacgctctctacgacgacgacggcgcattgaattgggctgtcgatgttgactacctttcgaacttggaattctggggccaagggaccgccgtcaccgtctcttcagcctctacaaagggccctagcgtgttccctctggctcctagcagcaagtcgacatctggcggaacagccgctctgggctgtctggtcaaggactactttcccgagcctgtgacagtgtcctggaactctggcgctctgacaagcggcgtgcacacatttccagccgtgctgcaaagcagcggcctgtactctctgagcagcgtggtcacagtgccaagctctagcctgggcacccagacctacatctgcaatgtgaaccacaagcctagcaacaccaaggtggacaagaaggtggaacccaagagctgcgacaagacccacacctgtcctccatgtcctgctccagaactgctggccggaccttccgtgttcctgtttcctccaaagcctaaggacaccctgatgatcagcagaacccctgaagtgacctgcgtggtggtggatgtgtctcacgaggaccctgaagtgaagttcaattggtacgtggacggcgtggaagtgcacaacgccaagaccaagcctagagaggaacagtacaacagcacctacagagtggtgtccgtgctgaccgtgctgcaccaggattggctgaacggcaaagagtacaagtgcaaggtgtccaacaaggccctgcctgcccctgaggaaaagaccatcagcaaggccaagggccagcctagggaaccccaggtttacacactgcctccaagccgcgacgaactgaccaagaaccaggtgtccctgacctgcctcgtgaagggcttctacccttccgatatcgccgtggaatgggagagcaatggccagcctgagaacaactacaagacaacccctcctgtgctggacagcgacggctcattcttcctgtacagcaagctgaccgtggacaagtccagatggcagcagggcaacgtgttcagctgtagcgtgctgcacgaagccctgcacagccactacacccagaaaagcctgtctctgagccccggcaaatgataa

SEQ ID NO: 256 - RNA, 1476 nt, synthetic construct
  source 1..1476: mol_type = other RNA
atggattggatttggagaatcctgttcctcgtgggcgccgctaccggagcccactcccaggtgcatctgacgcagtctgggcctgaggtgaggaagcctgggacctccgtaaaggtctcctgcaaggcccctggaaacacattgaagacttatgatctacactgggtgcgcagcgtccctggacaaggccttcagtggatgggatggataagccatgagggcgacaagaaggtcattgtggaaagattcaaggccaaagtcaccattgattgggacaggtccaccaatacggcctatctccaactgagcggcctcacatctggcgacacggccgtctattattgtgcgaaaggctcaaaacacaggctgcgagattacgctctctacgacgacgacggcgcattgaattgggctgtcgatgttgactacctttcgaacttggaattctggggccaagggaccgccgtcaccgtctcttcagcctctacaaagggccctagcgtgttccctctggctcctagcagcaagtcgacatctggcggaacagccgctctgggctgtctggtcaaggactactttcccgagcctgtgacagtgtcctggaactctggcgctctgacaagcggcgtgcacacatttccagccgtgctgcaaagcagcggcctgtactctctgagcagcgtggtcacagtgccaagctctagcctgggcacccagacctacatctgcaatgtgaaccacaagcctagcaacaccaaggtggacaagaaggtggaacccaagagctgcgacaagacccacacctgtcctccatgtcctgctccagaactgctggccggaccttccgtgttcctgtttcctccaaagcctaaggacaccctgatgatcagcagaacccctgaagtgacctgcgtggtggtggatgtgtctcacgaggaccctgaagtgaagttcaattggtacgtggacggcgtggaagtgcacaacgccaagaccaagcctagagaggaacagtacaacagcacctacagagtggtgtccgtgctgaccgtgctgcaccaggattggctgaacggcaaagagtacaagtgcaaggtgtccaacaaggccctgcctgcccctatcgaaaagaccatcagcaaggccaagggccagcctagggaaccccaggtttacacactgcctccaagccgcgacgaactgaccaagaaccaggtgtccctgacctgcctcgtgaagggcttctacccttccgatatcgccgtggaatgggagagcaatggccagcctgagaacaactacaagacaacccctcctgtgctggacagcgacggctcattcttcctgtacagcaagctgaccgtggacaagtccagatggcagcagggcaacgtgttcagctgtagcgtgctgcacgaagccctgcacagccactacacccagaaaagcctgtctctgagccccggcaaatgataa

SEQ ID NO: 257 - RNA, 1476 nt, synthetic construct
  source 1..1476: mol_type = other RNA
atggattggatttggagaatcctgttcctcgtgggcgccgctaccggagcccactcccaggtgcatctgacgcagtctgggcctgaggtgaggaagcctgggacctccgtaaaggtctcctgcaaggcccctggaaacacattgaagacttatgatctacactgggtgcgcagcgtccctggacaaggccttcagtggatgggatggataagccatgagggcgacaagaaggtcattgtggaaagattcaaggccaaagtcaccattgattgggacaggtccaccaatacggcctatctccaactgagcggcctcacatctggcgacacggccgtctattattgtgcgaaaggctcaaaacacaggctgcgagattacgctctctacgacgacgacggcgcattgaattgggctgtcgatgttgactacctttcgaacttggaattctggggccaagggaccgccgtcaccgtctcttcagcctctacaaagggccctagcgtgttccctctggctcctagcagcaagtcgacatctggcggaacagccgctctgggctgtctggtcaaggactactttcccgagcctgtgacagtgtcctggaactctggcgctctgacaagcggcgtgcacacatttccagccgtgctgcaaagcagcggcctgtactctctgagcagcgtggtcacagtgccaagctctagcctgggcacccagacctacatctgcaatgtgaaccacaagcctagcaacaccaaggtggacaagaaggtggaacccaagagctgcgacaagacccacacctgtcctccatgtcctgctccagaactgctgggcggaccttccgtgttcctgtttcctccaaagcctaaggacaccctgatgatcagcagaacccctgaagtgacctgcgtggtggtggatgtgtctcacgaggaccctgaagtgaagttcaattggtacgtggacggcgtggaagtgcacaacgccaagaccaagcctagagaggaacagtacaacagcacctacagagtggtgtccgtgctgaccgtgctgcaccaggattggctgaacggcaaagagtacaagtgcaaggtgtccaacaaggccctgcctgcccctgaggaaaagaccatcagcaaggccaagggccagcctagggaaccccaggtttacacactgcctccaagccgcgacgaactgaccaagaaccaggtgtccctgacctgcctcgtgaagggcttctacccttccgatatcgccgtggaatgggagagcaatggccagcctgagaacaactacaagacaacccctcctgtgctggacagcgacggctcattcttcctgtacagcaagctgaccgtggacaagtccagatggcagcagggcaacgtgttcagctgtagcgtgctgcacgaagccctgcacagccactacacccagaaaagcctgtctctgagccccggcaaatgataa

SEQ ID NO: 258 - RNA, 1476 nt, synthetic construct
  source 1..1476: mol_type = other RNA
atggattggatttggagaatcctgttcctcgtgggcgccgctaccggagcccactcccaggtgcatctgacgcagtctgggcctgaggtgaggaagcctgggacctccgtaaaggtctcctgcaaggcccctggaaacacattgaagacttatgatctacactgggtgcgcagcgtccctggacaaggccttcagtggatgggatggataagccatgagggcgacaagaaggtcattgtggaaagattcaaggccaaagtcaccattgattgggacaggtccaccaatacggcctatctccaactgagcggcctcacatctggcgacacggccgtctattattgtgcgaaaggctcaaaacacaggctgcgagattacgctctctacgacgacgacggcgcattgaattgggctgtcgatgttgactacctttcgaacttggaattctggggccaagggaccgccgtcaccgtctcttcagcctctacaaagggccctagcgtgttccctctggctcctagcagcaagtcgacatctggcggaacagccgctctgggctgtctggtcaaggactactttcccgagcctgtgacagtgtcctggaactctggcgctctgacaagcggcgtgcacacatttccagccgtgctgcaaagcagcggcctgtactctctgagcagcgtggtcacagtgccaagctctagcctgggcacccagacctacatctgcaatgtgaaccacaagcctagcaacaccaaggtggacaagaaggtggaacccaagagctgcgacaagacccacacctgtcctccatgtcctgctccagaactgctggccggaccttccgtgttcctgtttcctccaaagcctaaggacaccctgatgatcagcagaacccctgaagtgacctgcgtggtggtggatgtgtctcacgaggaccccgaagtgaagttcaattggtacgtggacggcgtggaagtgcacaatgccaagaccaagcctagagaggaacagtacaacagcacctacagagtggtgtccgtgctgaccgtgctgcaccaggattggctgaacggcaaagagtacaagtgcaaggtgtccaacaaggccctgcctctgcctgaggaaaagaccatcagcaaggccaagggccagcctcgcgaacctcaagtctgtacactgcctcctagccgcgacgaactgaccaagaaccaggtgtccctgagctgcgccgtgaagggcttttacccttccgatatcgccgtggaatgggagagcaatggccagcctgagaacaactacaagacaacccctcctgtgctggacagcgacggctcattcttcctggtgtccaagctgacagtggacaagagcagatggcagcagggcaacgtgttcagctgcagcgtgctgcatgaagccctgcacagccactacacccagaagtccctgtctctgagccccggcaagtgataa

SEQ ID NO: 259 - RNA, 1476 nt, synthetic construct
  source 1..1476: mol_type = other RNA
atggattggatttggagaatcctgttcctcgtgggcgccgctaccggagcccactcccaggtgcatctgacgcagtctgggcctgaggtgaggaagcctgggacctccgtaaaggtctcctgcaaggcccctggaaacacattgaagacttatgatctacactgggtgcgcagcgtccctggacaaggccttcagtggatgggatggataagccatgagggcgacaagaaggtcattgtggaaagattcaaggccaaagtcaccattgattgggacaggtccaccaatacggcctatctccaactgagcggcctcacatctggcgacacggccgtctattattgtgcgaaaggctcaaaacacaggctgcgagattacgctctctacgacgacgacggcgcattgaattgggctgtcgatgttgactacctttcgaacttggaattctggggccaagggaccgccgtcaccgtctcttcagcctctacaaagggccctagcgtgttccctctggctcctagcagcaagtcgacatctggcggaacagccgctctgggctgtctggtcaaggactactttcccgagcctgtgacagtgtcctggaactctggcgctctgacaagcggcgtgcacacatttccagccgtgctgcaaagcagcggcctgtactctctgagcagcgtggtcacagtgccaagctctagcctgggcacccagacctacatctgcaatgtgaaccacaagcctagcaacaccaaggtggacaagaaggtggaacccaagagctgcgacaagacccacacctgtcctccatgtcctgctccagaactgctggccggaccttccgtgttcctgtttcctccaaagcctaaggacaccctgatgatcagcagaacccctgaagtgacctgcgtggtggtggatgtgtctcacgaggaccctgaagtgaagttcaattggtacgtggacggcgtggaagtgcacaacgccaagaccaagcctagagaggaacagtacaacagcacctacagagtggtgtccgtgctgaccgtgctgcaccaggattggctgaacggcaaagagtacaagtgcaaggtgtccaacaaggccctgcctgcccctgaggaaaagaccatcagcaaggccaagggccagcctcgcgaacctcaagtctgtacactgcctcctagccgcgacgaactgaccaagaaccaggtgtccctgagctgcgccgtgaagggcttttacccttccgatatcgccgtggaatgggagagcaatggccagcctgagaacaactacaagacaacccctcctgtgctggacagcgacggctcattcttcctggtgtccaagctgacagtggacaagagcagatggcagcagggcaacgtgttcagctgcagcgtgctgcatgaagccctgcacagccactacacccagaagtccctgtctctgagccccggcaagtgataa

SEQ ID NO: 260 - RNA, 1476 nt, synthetic construct
  source 1..1476: mol_type = other RNA
atggattggatttggagaatcctgttcctcgtgggcgccgctaccggagcccactcccaggtgcatctgacgcagtctgggcctgaggtgaggaagcctgggacctccgtaaaggtctcctgcaaggcccctggaaacacattgaagacttatgatctacactgggtgcgcagcgtccctggacaaggccttcagtggatgggatggataagccatgagggcgacaagaaggtcattgtggaaagattcaaggccaaagtcaccattgattgggacaggtccaccaatacggcctatctccaactgagcggcctcacatctggcgacacggccgtctattattgtgcgaaaggctcaaaacacaggctgcgagattacgctctctacgacgacgacggcgcattgaattgggctgtcgatgttgactacctttcgaacttggaattctggggccaagggaccgccgtcaccgtctcttcagcctctacaaagggccctagcgtgttccctctggctcctagcagcaagtcgacatctggcggaacagccgctctgggctgtctggtcaaggactactttcccgagcctgtgacagtgtcctggaactctggcgctctgacaagcggcgtgcacacatttccagccgtgctgcaaagcagcggcctgtactctctgagcagcgtggtcacagtgccaagctctagcctgggcacccagacctacatctgcaatgtgaaccacaagcctagcaacaccaaggtggacaagaaggtggaacccaagagctgcgacaagacccacacctgtcctccatgtcctgctccagaactgctggccggaccttccgtgttcctgtttcctccaaagcctaaggacaccctgatgatcagcagaacccctgaagtgacctgcgtggtggtggatgtgtctcacgaggaccctgaagtgaagttcaattggtacgtggacggcgtggaagtgcacaacgccaagaccaagcctagagaggaacagtacaacagcacctacagagtggtgtccgtgctgaccgtgctgcaccaggattggctgaacggcaaagagtacaagtgcaaggtgtccaacaaggccctgcctgcccctatcgaaaagaccatcagcaaggccaagggccagcctcgcgaacctcaagtctgtacactgcctcctagccgcgacgaactgaccaagaaccaggtgtccctgagctgcgccgtgaagggcttttacccttccgatatcgccgtggaatgggagagcaatggccagcctgagaacaactacaagacaacccctcctgtgctggacagcgacggctcattcttcctggtgtccaagctgacagtggacaagagcagatggcagcagggcaacgtgttcagctgcagcgtgctgcatgaagccctgcacagccactacacccagaagtccctgtctctgagccccggcaagtgataa

SEQ ID NO: 261 - RNA, 1476 nt, synthetic construct
  source 1..1476: mol_type = other RNA
atggattggatttggagaatcctgttcctcgtgggcgccgctaccggagcccactcccaggtgcatctgacgcagtctgggcctgaggtgaggaagcctgggacctccgtaaaggtctcctgcaaggcccctggaaacacattgaagacttatgatctacactgggtgcgcagcgtccctggacaaggccttcagtggatgggatggataagccatgagggcgacaagaaggtcattgtggaaagattcaaggccaaagtcaccattgattgggacaggtccaccaatacggcctatctccaactgagcggcctcacatctggcgacacggccgtctattattgtgcgaaaggctcaaaacacaggctgcgagattacgctctctacgacgacgacggcgcattgaattgggctgtcgatgttgactacctttcgaacttggaattctggggccaagggaccgccgtcaccgtctcttcagcctctacaaagggccctagcgtgttccctctggctcctagcagcaagtcgacatctggcggaacagccgctctgggctgtctggtcaaggactactttcccgagcctgtgacagtgtcctggaactctggcgctctgacaagcggcgtgcacacatttccagccgtgctgcaaagcagcggcctgtactctctgagcagcgtggtcacagtgccaagctctagcctgggcacccagacctacatctgcaatgtgaaccacaagcctagcaacaccaaggtggacaagaaggtggaacccaagagctgcgacaagacccacacctgtcctccatgtcctgctccagaactgctgggcggaccttccgtgttcctgtttcctccaaagcctaaggacaccctgatgatcagcagaacccctgaagtgacctgcgtggtggtggatgtgtctcacgaggaccctgaagtgaagttcaattggtacgtggacggcgtggaagtgcacaacgccaagaccaagcctagagaggaacagtacaacagcacctacagagtggtgtccgtgctgaccgtgctgcaccaggattggctgaacggcaaagagtacaagtgcaaggtgtccaacaaggccctgcctgcccctgaggaaaagaccatcagcaaggccaagggccagcctcgcgaacctcaagtctgtacactgcctcctagccgcgacgaactgaccaagaaccaggtgtccctgagctgcgccgtgaagggcttttacccttccgatatcgccgtggaatgggagagcaatggccagcctgagaacaactacaagacaacccctcctgtgctggacagcgacggctcattcttcctggtgtccaagctgacagtggacaagagcagatggcagcagggcaacgtgttcagctgcagcgtgctgcatgaagccctgcacagccactacacccagaagtccctgtctctgagccccggcaagtgataa

SEQ ID NO: 262 - RNA, 1476 nt, synthetic construct
  source 1..1476: mol_type = other RNA
atggattggatttggagaatcctgttcctcgtgggcgccgctaccggagcccactcccaggtgcatctgacgcagtctgggcctgaggtgaggaagcctgggacctccgtaaaggtctcctgcaaggcccctggaaacacattgaagacttatgatctacactgggtgcgcagcgtccctggacaaggccttcagtggatgggatggataagccatgagggcgacaagaaggtcattgtggaaagattcaaggccaaagtcaccattgattgggacaggtccaccaatacggcctatctccaactgagcggcctcacatctggcgacacggccgtctattattgtgcgaaaggctcaaaacacaggctgcgagattacgctctctacgacgacgacggcgcattgaattgggctgtcgatgttgactacctttcgaacttggaattctggggccaagggaccgccgtcaccgtctcttcagcctctacaaagggccctagcgtgttccctctggctcctagcagcaagtcgacatctggcggaacagccgctctgggctgtctggtcaaggactactttcccgagcctgtgacagtgtcctggaactctggcgctctgacaagcggcgtgcacacatttccagccgtgctgcaaagcagcggcctgtactctctgagcagcgtggtcacagtgccaagctctagcctgggcacccagacctacatctgcaatgtgaaccacaagcctagcaacaccaaggtggacaagaaggtggaacccaagagctgcgacaagacccacacctgtcctccatgtcctgctccagaactgctggccggaccttccgtgttcctgtttcctccaaagcctaaggacaccctgatgatcagcagaacccctgaagtgacctgcgtggtggtggatgtgtctcacgaggaccccgaagtgaagttcaattggtacgtggacggcgtggaagtgcacaatgccaagaccaagcctagagaggaacagtacaacagcacctacagagtggtgtccgtgctgaccgtgctgcaccaggattggctgaacggcaaagagtacaagtgcaaggtgtccaacaaggccctgcctctgcctgaggaaaagaccatcagcaaggccaagggccagcctagggaaccccaggtttacaccctgcctccatgccgcgacgaactgaccaagaaccaggtgtccctgtggtgcctggtcaagggcttctacccttccgatatcgccgtggaatgggagagcaatggccagcctgagaacaactacaagacaacccctcctgtgctggacagcgacggctcattcttcctgtacagcaagctgacagtggacaagagcagatggcagcagggcaacgtgttcagctgcagcgtgctgcatgaagccctgcacagccactacacccagaagtccctgtctctgagccccggcaagtgataa

SEQ ID NO: 263 - RNA, 1476 nt, synthetic construct
  source 1..1476: mol_type = other RNA
atggattggatttggagaatcctgttcctcgtgggcgccgctaccggagcccactcccaggtgcatctgacgcagtctgggcctgaggtgaggaagcctgggacctccgtaaaggtctcctgcaaggcccctggaaacacattgaagacttatgatctacactgggtgcgcagcgtccctggacaaggccttcagtggatgggatggataagccatgagggcgacaagaaggtcattgtggaaagattcaaggccaaagtcaccattgattgggacaggtccaccaatacggcctatctccaactgagcggcctcacatctggcgacacggccgtctattattgtgcgaaaggctcaaaacacaggctgcgagattacgctctctacgacgacgacggcgcattgaattgggctgtcgatgttgactacctttcgaacttggaattctggggccaagggaccgccgtcaccgtctcttcagcctctacaaagggccctagcgtgttccctctggctcctagcagcaagtcgacatctggcggaacagccgctctgggctgtctggtcaaggactactttcccgagcctgtgacagtgtcctggaactctggcgctctgacaagcggcgtgcacacatttccagccgtgctgcaaagcagcggcctgtactctctgagcagcgtggtcacagtgccaagctctagcctgggcacccagacctacatctgcaatgtgaaccacaagcctagcaacaccaaggtggacaagaaggtggaacccaagagctgcgacaagacccacacctgtcctccatgtcctgctccagaactgctggccggaccttccgtgttcctgtttcctccaaagcctaaggacaccctgatgatcagcagaacccctgaagtgacctgcgtggtggtggatgtgtctcacgaggaccctgaagtgaagttcaattggtacgtggacggcgtggaagtgcacaacgccaagaccaagcctagagaggaacagtacaacagcacctacagagtggtgtccgtgctgaccgtgctgcaccaggattggctgaacggcaaagagtacaagtgcaaggtgtccaacaaggccctgcctgcccctgaggaaaagaccatcagcaaggccaagggccagcctagggaaccccaggtttacaccctgcctccatgccgcgacgaactgaccaagaaccaggtgtccctgtggtgcctggtcaagggcttctacccttccgatatcgccgtggaatgggagagcaatggccagcctgagaacaactacaagacaacccctcctgtgctggacagcgacggctcattcttcctgtacagcaagctgacagtggacaagagcagatggcagcagggcaacgtgttcagctgcagcgtgctgcatgaagccctgcacagccactacacccagaagtccctgtctctgagccccggcaagtgataa

SEQ ID NO: 264 - RNA, 1476 nt, synthetic construct
  source 1..1476: mol_type = other RNA
atggattggatttggagaatcctgttcctcgtgggcgccgctaccggagcccactcccaggtgcatctgacgcagtctgggcctgaggtgaggaagcctgggacctccgtaaaggtctcctgcaaggcccctggaaacacattgaagacttatgatctacactgggtgcgcagcgtccctggacaaggccttcagtggatgggatggataagccatgagggcgacaagaaggtcattgtggaaagattcaaggccaaagtcaccattgattgggacaggtccaccaatacggcctatctccaactgagcggcctcacatctggcgacacggccgtctattattgtgcgaaaggctcaaaacacaggctgcgagattacgctctctacgacgacgacggcgcattgaattgggctgtcgatgttgactacctttcgaacttggaattctggggccaagggaccgccgtcaccgtctcttcagcctctacaaagggccctagcgtgttccctctggctcctagcagcaagtcgacatctggcggaacagccgctctgggctgtctggtcaaggactactttcccgagcctgtgacagtgtcctggaactctggcgctctgacaagcggcgtgcacacatttccagccgtgctgcaaagcagcggcctgtactctctgagcagcgtggtcacagtgccaagctctagcctgggcacccagacctacatctgcaatgtgaaccacaagcctagcaacaccaaggtggacaagaaggtggaacccaagagctgcgacaagacccacacctgtcctccatgtcctgctccagaactgctggccggaccttccgtgttcctgtttcctccaaagcctaaggacaccctgatgatcagcagaacccctgaagtgacctgcgtggtggtggatgtgtctcacgaggaccctgaagtgaagttcaattggtacgtggacggcgtggaagtgcacaacgccaagaccaagcctagagaggaacagtacaacagcacctacagagtggtgtccgtgctgaccgtgctgcaccaggattggctgaacggcaaagagtacaagtgcaaggtgtccaacaaggccctgcctgcccctatcgaaaagaccatcagcaaggccaagggccagcctagggaaccccaggtttacaccctgcctccatgccgcgacgaactgaccaagaaccaggtgtccctgtggtgcctggtcaagggcttctacccttccgatatcgccgtggaatgggagagcaatggccagcctgagaacaactacaagacaacccctcctgtgctggacagcgacggctcattcttcctgtacagcaagctgacagtggacaagagcagatggcagcagggcaacgtgttcagctgcagcgtgctgcatgaagccctgcacagccactacacccagaagtccctgtctctgagccccggcaagtgataa

SEQ ID NO: 265 - RNA, 1476 nt, synthetic construct
  source 1..1476: mol_type = other RNA
atggattggatttggagaatcctgttcctcgtgggcgccgctaccggagcccactcccaggtgcatctgacgcagtctgggcctgaggtgaggaagcctgggacctccgtaaaggtctcctgcaaggcccctggaaacacattgaagacttatgatctacactgggtgcgcagcgtccctggacaaggccttcagtggatgggatggataagccatgagggcgacaagaaggtcattgtggaaagattcaaggccaaagtcaccattgattgggacaggtccaccaatacggcctatctccaactgagcggcctcacatctggcgacacggccgtctattattgtgcgaaaggctcaaaacacaggctgcgagattacgctctctacgacgacgacggcgcattgaattgggctgtcgatgttgactacctttcgaacttggaattctggggccaagggaccgccgtcaccgtctcttcagcctctacaaagggccctagcgtgttccctctggctcctagcagcaagtcgacatctggcggaacagccgctctgggctgtctggtcaaggactactttcccgagcctgtgacagtgtcctggaactctggcgctctgacaagcggcgtgcacacatttccagccgtgctgcaaagcagcggcctgtactctctgagcagcgtggtcacagtgccaagctctagcctgggcacccagacctacatctgcaatgtgaaccacaagcctagcaacaccaaggtggacaagaaggtggaacccaagagctgcgacaagacccacacctgtcctccatgtcctgctccagaactgctgggcggaccttccgtgttcctgtttcctccaaagcctaaggacaccctgatgatcagcagaacccctgaagtgacctgcgtggtggtggatgtgtctcacgaggaccctgaagtgaagttcaattggtacgtggacggcgtggaagtgcacaacgccaagaccaagcctagagaggaacagtacaacagcacctacagagtggtgtccgtgctgaccgtgctgcaccaggattggctgaacggcaaagagtacaagtgcaaggtgtccaacaaggccctgcctgcccctgaggaaaagaccatcagcaaggccaagggccagcctagggaaccccaggtttacaccctgcctccatgccgcgacgaactgaccaagaaccaggtgtccctgtggtgcctggtcaagggcttctacccttccgatatcgccgtggaatgggagagcaatggccagcctgagaacaactacaagacaacccctcctgtgctggacagcgacggctcattcttcctgtacagcaagctgacagtggacaagagcagatggcagcagggcaacgtgttcagctgcagcgtgctgcatgaagccctgcacagccactacacccagaagtccctgtctctgagccccggcaagtgataa

SEQ ID NO: 266 - DNA, 1488 bp, synthetic construct
  source 1..1488: mol_type = other DNA
atggattggatctggcgcatcctgtttctcgtgggagctgccacaggcgcccactctcaagttcacctgacacagtctggccccgaagtgcggaagcctggcacaagcgtgaaggtgtcctgtaaagcccctggcaacaccctgaaaacctacgacctgcactgggtccgatctgtgcctggacaaggactgcagtggatgggctggattagccacgagggcgacaagaaagtgatcgtggaacggttcaaggccaaagtgaccatcgactgggacagaagcaccaacaccgcctacctgcagctgagcggactgacatctggcgataccgccgtgtactactgtgccaagggcagcaagcaccggctgagagattacgccctgtacgacgatgacggcgccctgaattgggccgtcgatgtggactacctgagcaacctggaattctggggccagggaacagccgtgacagtgtctagtgcatctgtggccgctcctagcgtgttcatcttcccacctagcgacgaggaactgaagtctggcacagccagcgtcgtgtgcctgctgaacaacttctaccccagagaagccaaggtgcagtggaaggtggacaacgccctgcagagcggcaatagccaagagagcgtgaccgagcaggacagcaaggactctacctacagcctgagcagcaccctgacactgagcaaggccgactacgagaagcacaaagtgtacgcctgcgaagtgacccaccagggcctttctagccctgtgaccaagagcttcaaccggggcgagtgcgataagacccacacctgtcctccatgtccagctccagaactgctcggcggaccttccgtgttcctgtttcctccaaagcctaaggacaccctgatgatcagcagaacccctgaagtgacctgcgtggtggtggatgtgtctcacgaggaccccgaagtgaagttcaattggtacgtggacggcgtggaagtgcacaacgccaagaccaagcctagagaggaacagtacaacagcacctacagagtggtgtccgtgctgacagtgctgcaccaggattggctgaacggcaaagagtacaagtgcaaggtgtccaacaaggccctgcctgctcctatcgagaaaaccatcagcaaggccaagggccagcctagggaaccccaggtttacacactgcctccaagccgcgaggaaatgaccaagaaccaggtgtccctgacctgcctcgtgaagggcttctacccttccgatatcgccgtggaatgggagagcaatggccagcctgagaacaactacaagacaacccctcctgtgctggacagcgacggctcattcttcctgtacagcaagctgactgtggataagtcccggtggcagcagggcaacgtgttcagctgttctgtgatgcacgaagccctgcacaaccactacacccagaaaagcctgtctctgagccccggcaagtgataa

SEQ ID NO: 267 - DNA, 1488 bp, synthetic construct
  source 1..1488: mol_type = other DNA
atggattggatctggcgcatcctgtttctcgtgggagctgccacaggcgcccactctcaagttcacctgacacagtctggccccgaagtgcggaagcctggcacaagcgtgaaggtgtcctgtaaagcccctggcaacaccctgaaaacctacgacctgcactgggtccgatctgtgcctggacaaggactgcagtggatgggctggattagccacgagggcgacaagaaagtgatcgtggaacggttcaaggccaaagtgaccatcgactgggacagaagcaccaacaccgcctacctgcagctgagcggactgacatctggcgataccgccgtgtactactgtgccaagggcagcaagcaccggctgagagattacgccctgtacgacgatgacggcgccctgaattgggccgtcgatgtggactacctgagcaacctggaattctggggccagggaacagccgtgacagtgtctagtgcatctgtggccgctcctagcgtgttcatcttcccacctagcgacgaggaactgaagtctggcacagccagcgtcgtgtgcctgctgaacaacttctaccccagagaagccaaggtgcagtggaaggtggacaacgccctgcagagcggcaatagccaagagagcgtgaccgagcaggacagcaaggactctacctacagcctgagcagcaccctgacactgagcaaggccgactacgagaagcacaaagtgtacgcctgcgaagtgacccaccagggcctttctagccctgtgaccaagagcttcaaccggggcgagtgcgataagacccacacctgtcctccatgtccagctccagaactgctcggcggaccttccgtgttcctgtttcctccaaagcctaaggacaccctgatgatcagcagaacccctgaagtgacctgcgtggtggtggatgtgtctcacgaggaccccgaagtgaagttcaattggtacgtggacggcgtggaagtgcacaacgccaagaccaagcctagagaggaacagtacaacagcacctacagagtggtgtccgtgctgacagtgctgcaccaggattggctgaacggcaaagagtacaagtgcaaggtgtccaacaaggccctgcctgctcctatcgagaaaaccatcagcaaggccaagggccagcctagggaaccccaggtttacacactgcctccaagccgcgaggaaatgaccaagaaccaggtgtccctgacctgcctcgtgaagggcttctacccttccgatatcgccgtggaatgggagagcaatggccagcctgagaacaactacaagacaacccctcctgtgctggacagcgacggctcattcttcctgtacagcaagctgaccgtggacaagtccagatggcagcagggcaacgtgttcagctgtagcgtgctgcacgaagccctgcacagccactacacccagaaaagcctgtctctgagccccggcaaatgataa

SEQ ID NO: 268 - DNA, 1488 bp, synthetic construct
  source 1..1488: mol_type = other DNA
atggattggatctggcgcatcctgtttctcgtgggagctgccacaggcgcccactctcaagttcacctgacacagtctggccccgaagtgcggaagcctggcacaagcgtgaaggtgtcctgtaaagcccctggcaacaccctgaaaacctacgacctgcactgggtccgatctgtgcctggacaaggactgcagtggatgggctggattagccacgagggcgacaagaaagtgatcgtggaacggttcaaggccaaagtgaccatcgactgggacagaagcaccaacaccgcctacctgcagctgagcggactgacatctggcgataccgccgtgtactactgtgccaagggcagcaagcaccggctgagagattacgccctgtacgacgatgacggcgccctgaattgggccgtcgatgtggactacctgagcaacctggaattctggggccagggaacagccgtgacagtgtctagtgcatctgtggccgctcctagcgtgttcatcttcccacctagcgacgaggaactgaagtctggcacagccagcgtcgtgtgcctgctgaacaacttctaccccagagaagccaaggtgcagtggaaggtggacaacgccctgcagagcggcaatagccaagagagcgtgaccgagcaggacagcaaggactctacctacagcctgagcagcaccctgacactgagcaaggccgactacgagaagcacaaagtgtacgcctgcgaagtgacccaccagggcctttctagccctgtgaccaagagcttcaaccggggcgagtgcgataagacccacacctgtcctccatgtccagctccagaactgctggccggaccttccgtgttcctgtttcctccaaagcctaaggacaccctgatgatcagcagaacccctgaagtgacctgcgtggtggtggatgtgtctcacgaggaccccgaagtgaagttcaattggtacgtggacggcgtggaagtgcacaatgccaagaccaagcctagagaggaacagtacaacagcacctacagagtggtgtccgtgctgaccgtgctgcaccaggattggctgaacggcaaagagtacaagtgcaaggtgtccaacaaggccctgcctctgcctgaggaaaagaccatcagcaaggccaagggccagcctagggaaccccaggtttacacactgcctccaagccgcgaggaaatgaccaagaaccaggtgtccctgacctgcctcgtgaagggcttctacccttccgatatcgccgtggaatgggagagcaatggccagcctgagaacaactacaagacaacccctcctgtgctggacagcgacggctcattcttcctgtacagcaagctgaccgtggacaagtccagatggcagcagggcaacgtgttcagctgtagcgtgctgcacgaagccctgcacagccactacacccagaaaagcctgtctctgagccccggcaaatgataa

SEQ ID NO: 269 - DNA, 1488 bp, synthetic construct
  source 1..1488: mol_type = other DNA
atggattggatctggcgcatcctgtttctcgtgggagctgccacaggcgcccactctcaagttcacctgacacagtctggccccgaagtgcggaagcctggcacaagcgtgaaggtgtcctgtaaagcccctggcaacaccctgaaaacctacgacctgcactgggtccgatctgtgcctggacaaggactgcagtggatgggctggattagccacgagggcgacaagaaagtgatcgtggaacggttcaaggccaaagtgaccatcgactgggacagaagcaccaacaccgcctacctgcagctgagcggactgacatctggcgataccgccgtgtactactgtgccaagggcagcaagcaccggctgagagattacgccctgtacgacgatgacggcgccctgaattgggccgtcgatgtggactacctgagcaacctggaattctggggccagggaacagccgtgacagtgtctagtgcatctgtggccgctcctagcgtgttcatcttcccacctagcgacgaggaactgaagtctggcacagccagcgtcgtgtgcctgctgaacaacttctaccccagagaagccaaggtgcagtggaaggtggacaacgccctgcagagcggcaatagccaagagagcgtgaccgagcaggacagcaaggactctacctacagcctgagcagcaccctgacactgagcaaggccgactacgagaagcacaaagtgtacgcctgcgaagtgacccaccagggcctttctagccctgtgaccaagagcttcaaccggggcgagtgcgataagacccacacctgtcctccatgtccagctccagaactgctggccggaccttccgtgttcctgtttcctccaaagcctaaggacaccctgatgatcagcagaacccctgaagtgacctgcgtggtggtggatgtgtctcacgaggaccctgaagtgaagttcaattggtacgtggacggcgtggaagtgcacaacgccaagaccaagcctagagaggaacagtacaacagcacctacagagtggtgtccgtgctgaccgtgctgcaccaggattggctgaacggcaaagagtacaagtgcaaggtgtccaacaaggccctgcctgcccctgaggaaaagaccatcagcaaggccaagggccagcctagggaaccccaggtttacacactgcctccaagccgcgaggaaatgaccaagaaccaggtgtccctgacctgcctcgtgaagggcttctacccttccgatatcgccgtggaatgggagagcaatggccagcctgagaacaactacaagacaacccctcctgtgctggacagcgacggctcattcttcctgtacagcaagctgaccgtggacaagtccagatggcagcagggcaacgtgttcagctgtagcgtgctgcacgaagccctgcacagccactacacccagaaaagcctgtctctgagccccggcaaatgataa

SEQ ID NO: 270 - DNA, 1488 bp, synthetic construct
  source 1..1488: mol_type = other DNA
atggattggatctggcgcatcctgtttctcgtgggagctgccacaggcgcccactctcaagttcacctgacacagtctggccccgaagtgcggaagcctggcacaagcgtgaaggtgtcctgtaaagcccctggcaacaccctgaaaacctacgacctgcactgggtccgatctgtgcctggacaaggactgcagtggatgggctggattagccacgagggcgacaagaaagtgatcgtggaacggttcaaggccaaagtgaccatcgactgggacagaagcaccaacaccgcctacctgcagctgagcggactgacatctggcgataccgccgtgtactactgtgccaagggcagcaagcaccggctgagagattacgccctgtacgacgatgacggcgccctgaattgggccgtcgatgtggactacctgagcaacctggaattctggggccagggaacagccgtgacagtgtctagtgcatctgtggccgctcctagcgtgttcatcttcccacctagcgacgaggaactgaagtctggcacagccagcgtcgtgtgcctgctgaacaacttctaccccagagaagccaaggtgcagtggaaggtggacaacgccctgcagagcggcaatagccaagagagcgtgaccgagcaggacagcaaggactctacctacagcctgagcagcaccctgacactgagcaaggccgactacgagaagcacaaagtgtacgcctgcgaagtgacccaccagggcctttctagccctgtgaccaagagcttcaaccggggcgagtgcgataagacccacacctgtcctccatgtccagctccagaactgctggccggaccttccgtgttcctgtttcctccaaagcctaaggacaccctgatgatcagcagaacccctgaagtgacctgcgtggtggtggatgtgtctcacgaggaccctgaagtgaagttcaattggtacgtggacggcgtggaagtgcacaacgccaagaccaagcctagagaggaacagtacaacagcacctacagagtggtgtccgtgctgaccgtgctgcaccaggattggctgaacggcaaagagtacaagtgcaaggtgtccaacaaggccctgcctgcccctatcgaaaagaccatcagcaaggccaagggccagcctagggaaccccaggtttacacactgcctccaagccgcgaggaaatgaccaagaaccaggtgtccctgacctgcctcgtgaagggcttctacccttccgatatcgccgtggaatgggagagcaatggccagcctgagaacaactacaagacaacccctcctgtgctggacagcgacggctcattcttcctgtacagcaagctgaccgtggacaagtccagatggcagcagggcaacgtgttcagctgtagcgtgctgcacgaagccctgcacagccactacacccagaaaagcctgtctctgagccccggcaaatgataa

SEQ ID NO: 271 - DNA, 1488 bp, synthetic construct
  source 1..1488: mol_type = other DNA
atggattggatctggcgcatcctgtttctcgtgggagctgccacaggcgcccactctcaagttcacctgacacagtctggccccgaagtgcggaagcctggcacaagcgtgaaggtgtcctgtaaagcccctggcaacaccctgaaaacctacgacctgcactgggtccgatctgtgcctggacaaggactgcagtggatgggctggattagccacgagggcgacaagaaagtgatcgtggaacggttcaaggccaaagtgaccatcgactgggacagaagcaccaacaccgcctacctgcagctgagcggactgacatctggcgataccgccgtgtactactgtgccaagggcagcaagcaccggctgagagattacgccctgtacgacgatgacggcgccctgaattgggccgtcgatgtggactacctgagcaacctggaattctggggccagggaacagccgtgacagtgtctagtgcatctgtggccgctcctagcgtgttcatcttcccacctagcgacgaggaactgaagtctggcacagccagcgtcgtgtgcctgctgaacaacttctaccccagagaagccaaggtgcagtggaaggtggacaacgccctgcagagcggcaatagccaagagagcgtgaccgagcaggacagcaaggactctacctacagcctgagcagcaccctgacactgagcaaggccgactacgagaagcacaaagtgtacgcctgcgaagtgacccaccagggcctttctagccctgtgaccaagagcttcaaccggggcgagtgcgataagacccacacctgtcctccatgtccagctccagaactgctgggcggaccttccgtgttcctgtttcctccaaagcctaaggacaccctgatgatcagcagaacccctgaagtgacctgcgtggtggtggatgtgtctcacgaggaccctgaagtgaagttcaattggtacgtggacggcgtggaagtgcacaacgccaagaccaagcctagagaggaacagtacaacagcacctacagagtggtgtccgtgctgaccgtgctgcaccaggattggctgaacggcaaagagtacaagtgcaaggtgtccaacaaggccctgcctgcccctgaggaaaagaccatcagcaaggccaagggccagcctagggaaccccaggtttacacactgcctccaagccgcgaggaaatgaccaagaaccaggtgtccctgacctgcctcgtgaagggcttctacccttccgatatcgccgtggaatgggagagcaatggccagcctgagaacaactacaagacaacccctcctgtgctggacagcgacggctcattcttcctgtacagcaagctgaccgtggacaagtccagatggcagcagggcaacgtgttcagctgtagcgtgctgcacgaagccctgcacagccactacacccagaaaagcctgtctctgagccccggcaaatgataa

SEQ ID NO: 272 - DNA, 1488 bp, synthetic construct
  source 1..1488: mol_type = other DNA
atggattggatctggcgcatcctgtttctcgtgggagctgccacaggcgcccactctcaagttcacctgacacagtctggccccgaagtgcggaagcctggcacaagcgtgaaggtgtcctgtaaagcccctggcaacaccctgaaaacctacgacctgcactgggtccgatctgtgcctggacaaggactgcagtggatgggctggattagccacgagggcgacaagaaagtgatcgtggaacggttcaaggccaaagtgaccatcgactgggacagaagcaccaacaccgcctacctgcagctgagcggactgacatctggcgataccgccgtgtactactgtgccaagggcagcaagcaccggctgagagattacgccctgtacgacgatgacggcgccctgaattgggccgtcgatgtggactacctgagcaacctggaattctggggccagggaacagccgtgacagtgtctagtgcatctgtggccgctcctagcgtgttcatcttcccacctagcgacgaggaactgaagtctggcacagccagcgtcgtgtgcctgctgaacaacttctaccccagagaagccaaggtgcagtggaaggtggacaacgccctgcagagcggcaatagccaagagagcgtgaccgagcaggacagcaaggactctacctacagcctgagcagcaccctgacactgagcaaggccgactacgagaagcacaaagtgtacgcctgcgaagtgacccaccagggcctttctagccctgtgaccaagagcttcaaccggggcgagtgcgataagacccacacctgtcctccatgtccagctccagaactgctcggcggaccttccgtgttcctgtttcctccaaagcctaaggacaccctgatgatcagcagaacccctgaagtgacctgcgtggtggtggatgtgtctcacgaggaccccgaagtgaagttcaattggtacgtggacggcgtggaagtgcacaacgccaagaccaagcctagagaggaacagtacaacagcacctacagagtggtgtccgtgctgacagtgctgcaccaggattggctgaacggcaaagagtacaagtgcaaggtgtccaacaaggccctgcctgctcctatcgagaaaaccatcagcaaggccaagggccagcctagggaaccccaagtctgtacactgcctcctagccgcgaggaaatgaccaagaaccaggtgtccctgagctgcgccgtgaagggcttttacccttccgatatcgccgtggaatgggagagcaatggccagcctgagaacaactacaagacaacccctcctgtgctggacagcgacggctcattcttcctggtgtccaagctgacagtggacaagagcagatggcagcagggcaacgtgttcagctgctctgtgctgcacgaagccctgcacagccactacacccagaagtccctgtctctgagccccggcaagtgataa

SEQ ID NO: 273 - DNA, 1488 bp, synthetic construct
  source 1..1488: mol_type = other DNA
atggattggatctggcgcatcctgtttctcgtgggagctgccacaggcgcccactctcaagttcacctgacacagtctggccccgaagtgcggaagcctggcacaagcgtgaaggtgtcctgtaaagcccctggcaacaccctgaaaacctacgacctgcactgggtccgatctgtgcctggacaaggactgcagtggatgggctggattagccacgagggcgacaagaaagtgatcgtggaacggttcaaggccaaagtgaccatcgactgggacagaagcaccaacaccgcctacctgcagctgagcggactgacatctggcgataccgccgtgtactactgtgccaagggcagcaagcaccggctgagagattacgccctgtacgacgatgacggcgccctgaattgggccgtcgatgtggactacctgagcaacctggaattctggggccagggaacagccgtgacagtgtctagtgcatctgtggccgctcctagcgtgttcatcttcccacctagcgacgaggaactgaagtctggcacagccagcgtcgtgtgcctgctgaacaacttctaccccagagaagccaaggtgcagtggaaggtggacaacgccctgcagagcggcaatagccaagagagcgtgaccgagcaggacagcaaggactctacctacagcctgagcagcaccctgacactgagcaaggccgactacgagaagcacaaagtgtacgcctgcgaagtgacccaccagggcctttctagccctgtgaccaagagcttcaaccggggcgagtgcgataagacccacacctgtcctccatgtccagctccagaactgctggccggaccttccgtgttcctgtttcctccaaagcctaaggacaccctgatgatcagcagaacccctgaagtgacctgcgtggtggtggatgtgtctcacgaggaccccgaagtgaagttcaattggtacgtggacggcgtggaagtgcacaatgccaagaccaagcctagagaggaacagtacaacagcacctacagagtggtgtccgtgctgaccgtgctgcaccaggattggctgaacggcaaagagtacaagtgcaaggtgtccaacaaggccctgcctctgcctgaggaaaagaccatcagcaaggccaagggccagcctagggaaccccaagtctgtacactgcctcctagccgcgaggaaatgaccaagaaccaggtgtccctgagctgcgccgtgaagggcttttacccttccgatatcgccgtggaatgggagagcaatggccagcctgagaacaactacaagacaacccctcctgtgctggacagcgacggctcattcttcctggtgtccaagctgacagtggacaagagcagatggcagcagggcaacgtgttcagctgctctgtgctgcacgaagccctgcacagccactacacccagaagtccctgtctctgagccccggcaagtgataa

SEQ ID NO: 274 - DNA, 1488 bp, synthetic construct
  source 1..1488: mol_type = other DNA
atggattggatctggcgcatcctgtttctcgtgggagctgccacaggcgcccactctcaagttcacctgacacagtctggccccgaagtgcggaagcctggcacaagcgtgaaggtgtcctgtaaagcccctggcaacaccctgaaaacctacgacctgcactgggtccgatctgtgcctggacaaggactgcagtggatgggctggattagccacgagggcgacaagaaagtgatcgtggaacggttcaaggccaaagtgaccatcgactgggacagaagcaccaacaccgcctacctgcagctgagcggactgacatctggcgataccgccgtgtactactgtgccaagggcagcaagcaccggctgagagattacgccctgtacgacgatgacggcgccctgaattgggccgtcgatgtggactacctgagcaacctggaattctggggccagggaacagccgtgacagtgtctagtgcatctgtggccgctcctagcgtgttcatcttcccacctagcgacgaggaactgaagtctggcacagccagcgtcgtgtgcctgctgaacaacttctaccccagagaagccaaggtgcagtggaaggtggacaacgccctgcagagcggcaatagccaagagagcgtgaccgagcaggacagcaaggactctacctacagcctgagcagcaccctgacactgagcaaggccgactacgagaagcacaaagtgtacgcctgcgaagtgacccaccagggcctttctagccctgtgaccaagagcttcaaccggggcgagtgcgataagacccacacctgtcctccatgtccagctccagaactgctggccggaccttccgtgttcctgtttcctccaaagcctaaggacaccctgatgatcagcagaacccctgaagtgacctgcgtggtggtggatgtgtctcacgaggaccctgaagtgaagttcaattggtacgtggacggcgtggaagtgcacaacgccaagaccaagcctagagaggaacagtacaacagcacctacagagtggtgtccgtgctgaccgtgctgcaccaggattggctgaacggcaaagagtacaagtgcaaggtgtccaacaaggccctgcctgcccctgaggaaaagaccatcagcaaggccaagggccagcctagggaaccccaagtctgtacactgcctcctagccgcgaggaaatgaccaagaaccaggtgtccctgagctgcgccgtgaagggcttttacccttccgatatcgccgtggaatgggagagcaatggccagcctgagaacaactacaagacaacccctcctgtgctggacagcgacggctcattcttcctggtgtccaagctgacagtggacaagagcagatggcagcagggcaacgtgttcagctgctctgtgctgcacgaagccctgcacagccactacacccagaagtccctgtctctgagccccggcaagtgataa

SEQ ID NO: 275 - DNA, 1488 bp, synthetic construct
  source 1..1488: mol_type = other DNA
atggattggatctggcgcatcctgtttctcgtgggagctgccacaggcgcccactctcaagttcacctgacacagtctggccccgaagtgcggaagcctggcacaagcgtgaaggtgtcctgtaaagcccctggcaacaccctgaaaacctacgacctgcactgggtccgatctgtgcctggacaaggactgcagtggatgggctggattagccacgagggcgacaagaaagtgatcgtggaacggttcaaggccaaagtgaccatcgactgggacagaagcaccaacaccgcctacctgcagctgagcggactgacatctggcgataccgccgtgtactactgtgccaagggcagcaagcaccggctgagagattacgccctgtacgacgatgacggcgccctgaattgggccgtcgatgtggactacctgagcaacctggaattctggggccagggaacagccgtgacagtgtctagtgcatctgtggccgctcctagcgtgttcatcttcccacctagcgacgaggaactgaagtctggcacagccagcgtcgtgtgcctgctgaacaacttctaccccagagaagccaaggtgcagtggaaggtggacaacgccctgcagagcggcaatagccaagagagcgtgaccgagcaggacagcaaggactctacctacagcctgagcagcaccctgacactgagcaaggccgactacgagaagcacaaagtgtacgcctgcgaagtgacccaccagggcctttctagccctgtgaccaagagcttcaaccggggcgagtgcgataagacccacacctgtcctccatgtccagctccagaactgctggccggaccttccgtgttcctgtttcctccaaagcctaaggacaccctgatgatcagcagaacccctgaagtgacctgcgtggtggtggatgtgtctcacgaggaccctgaagtgaagttcaattggtacgtggacggcgtggaagtgcacaacgccaagaccaagcctagagaggaacagtacaacagcacctacagagtggtgtccgtgctgaccgtgctgcaccaggattggctgaacggcaaagagtacaagtgcaaggtgtccaacaaggccctgcctgcccctatcgaaaagaccatcagcaaggccaagggccagcctagggaaccccaagtctgtacactgcctcctagccgcgaggaaatgaccaagaaccaggtgtccctgagctgcgccgtgaagggcttttacccttccgatatcgccgtggaatgggagagcaatggccagcctgagaacaactacaagacaacccctcctgtgctggacagcgacggctcattcttcctggtgtccaagctgacagtggacaagagcagatggcagcagggcaacgtgttcagctgctctgtgctgcacgaagccctgcacagccactacacccagaagtccctgtctctgagccccggcaagtgataa

SEQ ID NO: 276 - DNA, 1488 bp, synthetic construct
  source 1..1488: mol_type = other DNA
atggattggatctggcgcatcctgtttctcgtgggagctgccacaggcgcccactctcaagttcacctgacacagtctggccccgaagtgcggaagcctggcacaagcgtgaaggtgtcctgtaaagcccctggcaacaccctgaaaacctacgacctgcactgggtccgatctgtgcctggacaaggactgcagtggatgggctggattagccacgagggcgacaagaaagtgatcgtggaacggttcaaggccaaagtgaccatcgactgggacagaagcaccaacaccgcctacctgcagctgagcggactgacatctggcgataccgccgtgtactactgtgccaagggcagcaagcaccggctgagagattacgccctgtacgacgatgacggcgccctgaattgggccgtcgatgtggactacctgagcaacctggaattctggggccagggaacagccgtgacagtgtctagtgcatctgtggccgctcctagcgtgttcatcttcccacctagcgacgaggaactgaagtctggcacagccagcgtcgtgtgcctgctgaacaacttctaccccagagaagccaaggtgcagtggaaggtggacaacgccctgcagagcggcaatagccaagagagcgtgaccgagcaggacagcaaggactctacctacagcctgagcagcaccctgacactgagcaaggccgactacgagaagcacaaagtgtacgcctgcgaagtgacccaccagggcctttctagccctgtgaccaagagcttcaaccggggcgagtgcgataagacccacacctgtcctccatgtccagctccagaactgctgggcggaccttccgtgttcctgtttcctccaaagcctaaggacaccctgatgatcagcagaacccctgaagtgacctgcgtggtggtggatgtgtctcacgaggaccctgaagtgaagttcaattggtacgtggacggcgtggaagtgcacaacgccaagaccaagcctagagaggaacagtacaacagcacctacagagtggtgtccgtgctgaccgtgctgcaccaggattggctgaacggcaaagagtacaagtgcaaggtgtccaacaaggccctgcctgcccctgaggaaaagaccatcagcaaggccaagggccagcctagggaaccccaagtctgtacactgcctcctagccgcgaggaaatgaccaagaaccaggtgtccctgagctgcgccgtgaagggcttttacccttccgatatcgccgtggaatgggagagcaatggccagcctgagaacaactacaagacaacccctcctgtgctggacagcgacggctcattcttcctggtgtccaagctgacagtggacaagagcagatggcagcagggcaacgtgttcagctgctctgtgctgcacgaagccctgcacagccactacacccagaagtccctgtctctgagccccggcaagtgataa

SEQ ID NO: 277 - DNA, 1488 bp, synthetic construct
  source 1..1488: mol_type = other DNA
atggattggatctggcgcatcctgtttctcgtgggagctgccacaggcgcccactctcaagttcacctgacacagtctggccccgaagtgcggaagcctggcacaagcgtgaaggtgtcctgtaaagcccctggcaacaccctgaaaacctacgacctgcactgggtccgatctgtgcctggacaaggactgcagtggatgggctggattagccacgagggcgacaagaaagtgatcgtggaacggttcaaggccaaagtgaccatcgactgggacagaagcaccaacaccgcctacctgcagctgagcggactgacatctggcgataccgccgtgtactactgtgccaagggcagcaagcaccggctgagagattacgccctgtacgacgatgacggcgccctgaattgggccgtcgatgtggactacctgagcaacctggaattctggggccagggaacagccgtgacagtgtctagtgcatctgtggccgctcctagcgtgttcatcttcccacctagcgacgaggaactgaagtctggcacagccagcgtcgtgtgcctgctgaacaacttctaccccagagaagccaaggtgcagtggaaggtggacaacgccctgcagagcggcaatagccaagagagcgtgaccgagcaggacagcaaggactctacctacagcctgagcagcaccctgacactgagcaaggccgactacgagaagcacaaagtgtacgcctgcgaagtgacccaccagggcctttctagccctgtgaccaagagcttcaaccggggcgagtgcgataagacccacacctgtcctccatgtccagctccagaactgctcggcggaccttccgtgttcctgtttcctccaaagcctaaggacaccctgatgatcagcagaacccctgaagtgacctgcgtggtggtggatgtgtctcacgaggaccccgaagtgaagttcaattggtacgtggacggcgtggaagtgcacaacgccaagaccaagcctagagaggaacagtacaacagcacctacagagtggtgtccgtgctgacagtgctgcaccaggattggctgaacggcaaagagtacaagtgcaaggtgtccaacaaggccctgcctgctcctatcgagaaaaccatcagcaaggccaagggccagcctagggaaccccaggtttacaccctgcctccatgccgcgaggaaatgaccaagaaccaggtgtccctgtggtgcctcgtgaagggcttctacccttccgatatcgccgtggaatgggagagcaatggccagcctgagaacaactacaagacaacccctcctgtgctggacagcgacggctcattcttcctgtacagcaagctgaccgtggacaagtccagatggcagcagggcaacgtgttcagctgtagcgtgctgcacgaagccctgcacagccactacacccagaagtccctgtctctgagccccggcaagtgataa

SEQ ID NO: 278 - DNA, 1488 bp, synthetic construct
  source 1..1488: mol_type = other DNA
atggattggatctggcgcatcctgtttctcgtgggagctgccacaggcgcccactctcaagttcacctgacacagtctggccccgaagtgcggaagcctggcacaagcgtgaaggtgtcctgtaaagcccctggcaacaccctgaaaacctacgacctgcactgggtccgatctgtgcctggacaaggactgcagtggatgggctggattagccacgagggcgacaagaaagtgatcgtggaacggttcaaggccaaagtgaccatcgactgggacagaagcaccaacaccgcctacctgcagctgagcggactgacatctggcgataccgccgtgtactactgtgccaagggcagcaagcaccggctgagagattacgccctgtacgacgatgacggcgccctgaattgggccgtcgatgtggactacctgagcaacctggaattctggggccagggaacagccgtgacagtgtctagtgcatctgtggccgctcctagcgtgttcatcttcccacctagcgacgaggaactgaagtctggcacagccagcgtcgtgtgcctgctgaacaacttctaccccagagaagccaaggtgcagtggaaggtggacaacgccctgcagagcggcaatagccaagagagcgtgaccgagcaggacagcaaggactctacctacagcctgagcagcaccctgacactgagcaaggccgactacgagaagcacaaagtgtacgcctgcgaagtgacccaccagggcctttctagccctgtgaccaagagcttcaaccggggcgagtgcgataagacccacacctgtcctccatgtccagctccagaactgctggccggaccttccgtgttcctgtttcctccaaagcctaaggacaccctgatgatcagcagaacccctgaagtgacctgcgtggtggtggatgtgtctcacgaggaccccgaagtgaagttcaattggtacgtggacggcgtggaagtgcacaatgccaagaccaagcctagagaggaacagtacaacagcacctacagagtggtgtccgtgctgaccgtgctgcaccaggattggctgaacggcaaagagtacaagtgcaaggtgtccaacaaggccctgcctctgcctgaggaaaagaccatcagcaaggccaagggccagcctagggaaccccaggtttacaccctgcctccatgccgcgaggaaatgaccaagaaccaggtgtccctgtggtgcctcgtgaagggcttctacccttccgatatcgccgtggaatgggagagcaatggccagcctgagaacaactacaagacaacccctcctgtgctggacagcgacggctcattcttcctgtacagcaagctgaccgtggacaagtccagatggcagcagggcaacgtgttcagctgtagcgtgctgcacgaagccctgcacagccactacacccagaagtccctgtctctgagccccggcaagtgataa

SEQ ID NO: 279 - DNA, 1488 bp, synthetic construct
  source 1..1488: mol_type = other DNA
atggattggatctggcgcatcctgtttctcgtgggagctgccacaggcgcccactctcaagttcacctgacacagtctggccccgaagtgcggaagcctggcacaagcgtgaaggtgtcctgtaaagcccctggcaacaccctgaaaacctacgacctgcactgggtccgatctgtgcctggacaaggactgcagtggatgggctggattagccacgagggcgacaagaaagtgatcgtggaacggttcaaggccaaagtgaccatcgactgggacagaagcaccaacaccgcctacctgcagctgagcggactgacatctggcgataccgccgtgtactactgtgccaagggcagcaagcaccggctgagagattacgccctgtacgacgatgacggcgccctgaattgggccgtcgatgtggactacctgagcaacctggaattctggggccagggaacagccgtgacagtgtctagtgcatctgtggccgctcctagcgtgttcatcttcccacctagcgacgaggaactgaagtctggcacagccagcgtcgtgtgcctgctgaacaacttctaccccagagaagccaaggtgcagtggaaggtggacaacgccctgcagagcggcaatagccaagagagcgtgaccgagcaggacagcaaggactctacctacagcctgagcagcaccctgacactgagcaaggccgactacgagaagcacaaagtgtacgcctgcgaagtgacccaccagggcctttctagccctgtgaccaagagcttcaaccggggcgagtgcgataagacccacacctgtcctccatgtccagctccagaactgctggccggaccttccgtgttcctgtttcctccaaagcctaaggacaccctgatgatcagcagaacccctgaagtgacctgcgtggtggtggatgtgtctcacgaggaccctgaagtgaagttcaattggtacgtggacggcgtggaagtgcacaacgccaagaccaagcctagagaggaacagtacaacagcacctacagagtggtgtccgtgctgaccgtgctgcaccaggattggctgaacggcaaagagtacaagtgcaaggtgtccaacaaggccctgcctgcccctgaggaaaagaccatcagcaaggccaagggccagcctagggaaccccaggtttacaccctgcctccatgccgcgaggaaatgaccaagaaccaggtgtccctgtggtgcctcgtgaagggcttctacccttccgatatcgccgtggaatgggagagcaatggccagcctgagaacaactacaagacaacccctcctgtgctggacagcgacggctcattcttcctgtacagcaagctgaccgtggacaagtccagatggcagcagggcaacgtgttcagctgtagcgtgctgcacgaagccctgcacagccactacacccagaagtccctgtctctgagccccggcaagtgataa

SEQ ID NO: 280 - DNA, 1488 bp, synthetic construct
  source 1..1488: mol_type = other DNA
atggattggatctggcgcatcctgtttctcgtgggagctgccacaggcgcccactctcaagttcacctgacacagtctggccccgaagtgcggaagcctggcacaagcgtgaaggtgtcctgtaaagcccctggcaacaccctgaaaacctacgacctgcactgggtccgatctgtgcctggacaaggactgcagtggatgggctggattagccacgagggcgacaagaaagtgatcgtggaacggttcaaggccaaagtgaccatcgactgggacagaagcaccaacaccgcctacctgcagctgagcggactgacatctggcgataccgccgtgtactactgtgccaagggcagcaagcaccggctgagagattacgccctgtacgacgatgacggcgccctgaattgggccgtcgatgtggactacctgagcaacctggaattctggggccagggaacagccgtgacagtgtctagtgcatctgtggccgctcctagcgtgttcatcttcccacctagcgacgaggaactgaagtctggcacagccagcgtcgtgtgcctgctgaacaacttctaccccagagaagccaaggtgcagtggaaggtggacaacgccctgcagagcggcaatagccaagagagcgtgaccgagcaggacagcaaggactctacctacagcctgagcagcaccctgacactgagcaaggccgactacgagaagcacaaagtgtacgcctgcgaagtgacccaccagggcctttctagccctgtgaccaagagcttcaaccggggcgagtgcgataagacccacacctgtcctccatgtccagctccagaactgctggccggaccttccgtgttcctgtttcctccaaagcctaaggacaccctgatgatcagcagaacccctgaagtgacctgcgtggtggtggatgtgtctcacgaggaccctgaagtgaagttcaattggtacgtggacggcgtggaagtgcacaacgccaagaccaagcctagagaggaacagtacaacagcacctacagagtggtgtccgtgctgaccgtgctgcaccaggattggctgaacggcaaagagtacaagtgcaaggtgtccaacaaggccctgcctgcccctatcgaaaagaccatcagcaaggccaagggccagcctagggaaccccaggtttacaccctgcctccatgccgcgaggaaatgaccaagaaccaggtgtccctgtggtgcctcgtgaagggcttctacccttccgatatcgccgtggaatgggagagcaatggccagcctgagaacaactacaagacaacccctcctgtgctggacagcgacggctcattcttcctgtacagcaagctgaccgtggacaagtccagatggcagcagggcaacgtgttcagctgtagcgtgctgcacgaagccctgcacagccactacacccagaagtccctgtctctgagccccggcaagtgataa

SEQ ID NO: 281 - DNA, 1488 bp, synthetic construct
  source 1..1488: mol_type = other DNA
atggattggatctggcgcatcctgtttctcgtgggagctgccacaggcgcccactctcaagttcacctgacacagtctggccccgaagtgcggaagcctggcacaagcgtgaaggtgtcctgtaaagcccctggcaacaccctgaaaacctacgacctgcactgggtccgatctgtgcctggacaaggactgcagtggatgggctggattagccacgagggcgacaagaaagtgatcgtggaacggttcaaggccaaagtgaccatcgactgggacagaagcaccaacaccgcctacctgcagctgagcggactgacatctggcgataccgccgtgtactactgtgccaagggcagcaagcaccggctgagagattacgccctgtacgacgatgacggcgccctgaattgggccgtcgatgtggactacctgagcaacctggaattctggggccagggaacagccgtgacagtgtctagtgcatctgtggccgctcctagcgtgttcatcttcccacctagcgacgaggaactgaagtctggcacagccagcgtcgtgtgcctgctgaacaacttctaccccagagaagccaaggtgcagtggaaggtggacaacgccctgcagagcggcaatagccaagagagcgtgaccgagcaggacagcaaggactctacctacagcctgagcagcaccctgacactgagcaaggccgactacgagaagcacaaagtgtacgcctgcgaagtgacccaccagggcctttctagccctgtgaccaagagcttcaaccggggcgagtgcgataagacccacacctgtcctccatgtccagctccagaactgctgggcggaccttccgtgttcctgtttcctccaaagcctaaggacaccctgatgatcagcagaacccctgaagtgacctgcgtggtggtggatgtgtctcacgaggaccctgaagtgaagttcaattggtacgtggacggcgtggaagtgcacaacgccaagaccaagcctagagaggaacagtacaacagcacctacagagtggtgtccgtgctgaccgtgctgcaccaggattggctgaacggcaaagagtacaagtgcaaggtgtccaacaaggccctgcctgcccctgaggaaaagaccatcagcaaggccaagggccagcctagggaaccccaggtttacaccctgcctccatgccgcgaggaaatgaccaagaaccaggtgtccctgtggtgcctcgtgaagggcttctacccttccgatatcgccgtggaatgggagagcaatggccagcctgagaacaactacaagacaacccctcctgtgctggacagcgacggctcattcttcctgtacagcaagctgaccgtggacaagtccagatggcagcagggcaacgtgttcagctgtagcgtgctgcacgaagccctgcacagccactacacccagaagtccctgtctctgagccccggcaagtgataa

SEQ ID NO: 282 - DNA, 1488 bp, synthetic construct; identical to SEQ ID NO: 266
  source 1..1488: mol_type = other DNA

SEQ ID NO: 283 - DNA, 1488 bp, synthetic construct; identical to SEQ ID NO: 267
  source 1..1488: mol_type = other DNA

SEQ ID NO: 284 - DNA, 1488 bp, synthetic construct; identical to SEQ ID NO: 268
  source 1..1488: mol_type = other DNA

SEQ ID NO: 285 - DNA, 1488 bp, synthetic construct; identical to SEQ ID NO: 269
  source 1..1488: mol_type = other DNA

SEQ ID NO: 286 - DNA, 1488 bp, synthetic construct; identical to SEQ ID NO: 270
  source 1..1488: mol_type = other DNA

SEQ ID NO: 287 - DNA, 1488 bp, synthetic construct; identical to SEQ ID NO: 271
  source 1..1488: mol_type = other DNA

SEQ ID NO: 288 - DNA, 1488 bp, synthetic construct; identical to SEQ ID NO: 272
  source 1..1488: mol_type = other DNA

SEQ ID NO: 289 - DNA, 1488 bp, synthetic construct; identical to SEQ ID NO: 273
  source 1..1488: mol_type = other DNA

SEQ ID NO: 290 - DNA, 1488 bp, synthetic construct; identical to SEQ ID NO: 274
  source 1..1488: mol_type = other DNA

SEQ ID NO: 291 - DNA, 1488 bp, synthetic construct; identical to SEQ ID NO: 275
  source 1..1488: mol_type = other DNA

SEQ ID NO: 292 - DNA, 1488 bp, synthetic construct; identical to SEQ ID NO: 276
  source 1..1488: mol_type = other DNA

SEQ ID NO: 293 - DNA, 1488 bp, synthetic construct; identical to SEQ ID NO: 277
  source 1..1488: mol_type = other DNA

SEQ ID NO: 294 - DNA, 1488 bp, synthetic construct; identical to SEQ ID NO: 278
  source 1..1488: mol_type = other DNA

SEQ ID NO: 295 - DNA, 1488 bp, synthetic construct; identical to SEQ ID NO: 279
  source 1..1488: mol_type = other DNA

SEQ ID NO: 296 - DNA, 1488 bp, synthetic construct; identical to SEQ ID NO: 280
  source 1..1488: mol_type = other DNA

SEQ ID NO: 297 - DNA, 1488 bp, synthetic construct; identical to SEQ ID NO: 281
  source 1..1488: mol_type = other DNA

SEQ ID NO: 298 - DNA, 1488 bp, synthetic construct
  source 1..1488: mol_type = other DNA
atggattggatctggcgcatcctgtttctcgtgggagctgccacaggcgcccactctcaagttcacctgacacagtctggccccgaagtgcggaagcctggcacaagcgtgaaggtgtcctgtaaagcccctggcaacaccctgaaaacctacgacctgcactgggtccgatctgtgcctggacaaggactgcagtggatgggctggattagccacgagggcgacaagaaagtgatcgtggaacggttcaaggccaaagtgaccatcgactgggacagaagcaccaacaccgcctacctgcagctgagcggactgacatctggcgataccgccgtgtactactgtgccaagggcagcaagcaccggctgagagattacgccctgtacgacgatgacggcgccctgaattgggccgtcgatgtggactacctgagcaacctggaattctggggccagggaacagccgtgacagtgtctagtgcatctgtggccgctcctagcgtgttcatcttcccacctagcgacgaggaactgaagtctggcacagccagcgtcgtgtgcctgctgaacaacttctaccccagagaagccaaggtgcagtggaaggtggacaacgccctgcagagcggcaatagccaagagagcgtgaccgagcaggacagcaaggactctacctacagcctgagcagcaccctgacactgagcaaggccgactacgagaagcacaaagtgtacgcctgcgaagtgacccaccagggcctttctagccctgtgaccaagagcttcaaccggggcgagtgcgataagacccacacctgtcctccatgtccagctccagaactgctcggcggaccttccgtgttcctgtttcctccaaagcctaaggacaccctgatgatcagcagaacccctgaagtgacctgcgtggtggtggatgtgtctcacgaggaccccgaagtgaagttcaattggtacgtggacggcgtggaagtgcacaacgccaagaccaagcctagagaggaacagtacaacagcacctacagagtggtgtccgtgctgacagtgctgcaccaggattggctgaacggcaaagagtacaagtgcaaggtgtccaacaaggccctgcctgctcctatcgagaaaaccatcagcaaggccaagggccagcctagggaaccccaggtttacacactgcctccaagccgcgacgaactgaccaagaaccaggtgtccctgacctgcctcgtgaagggcttctacccttccgatatcgccgtggaatgggagagcaatggccagcctgagaacaactacaagacaacccctcctgtgctggacagcgacggctcattcttcctgtacagcaagctgactgtggataagtcccggtggcagcagggcaacgtgttcagctgttctgtgatgcacgaagccctgcacaaccactacacccagaaaagcctgtctctgagccccggcaagtgataa

SEQ ID NO: 299 - DNA, 1488 bp, synthetic construct
  source 1..1488: mol_type = other DNA
atggattggatctggcgcatcctgtttctcgtgggagctgccacaggcgcccactctcaagttcacctgacacagtctggccccgaagtgcggaagcctggcacaagcgtgaaggtgtcctgtaaagcccctggcaacaccctgaaaacctacgacctgcactgggtccgatctgtgcctggacaaggactgcagtggatgggctggattagccacgagggcgacaagaaagtgatcgtggaacggttcaaggccaaagtgaccatcgactgggacagaagcaccaacaccgcctacctgcagctgagcggactgacatctggcgataccgccgtgtactactgtgccaagggcagcaagcaccggctgagagattacgccctgtacgacgatgacggcgccctgaattgggccgtcgatgtggactacctgagcaacctggaattctggggccagggaacagccgtgacagtgtctagtgcatctgtggccgctcctagcgtgttcatcttcccacctagcgacgaggaactgaagtctggcacagccagcgtcgtgtgcctgctgaacaacttctaccccagagaagccaaggtgcagtggaaggtggacaacgccctgcagagcggcaatagccaagagagcgtgaccgagcaggacagcaaggactctacctacagcctgagcagcaccctgacactgagcaaggccgactacgagaagcacaaagtgtacgcctgcgaagtgacccaccagggcctttctagccctgtgaccaagagcttcaaccggggcgagtgcgataagacccacacctgtcctccatgtccagctccagaactgctcggcggaccttccgtgttcctgtttcctccaaagcctaaggacaccctgatgatcagcagaacccctgaagtgacctgcgtggtggtggatgtgtctcacgaggaccccgaagtgaagttcaattggtacgtggacggcgtggaagtgcacaacgccaagaccaagcctagagaggaacagtacaacagcacctacagagtggtgtccgtgctgacagtgctgcaccaggattggctgaacggcaaagagtacaagtgcaaggtgtccaacaaggccctgcctgctcctatcgagaaaaccatcagcaaggccaagggccagcctagggaaccccaggtttacacactgcctccaagccgcgacgaactgaccaagaaccaggtgtccctgacctgcctcgtgaagggcttctacccttccgatatcgccgtggaatgggagagcaatggccagcctgagaacaactacaagacaacccctcctgtgctggacagcgacggctcattcttcctgtacagcaagctgaccgtggacaagtccagatggcagcagggcaacgtgttcagctgtagcgtgctgcacgaagccctgcacagccactacacccagaaaagcctgtctctgagccccggcaaatgataa

SEQ ID NO: 300 - DNA, 1488 bp, synthetic construct
  source 1..1488: mol_type = other DNA
atggattggatctggcgcatcctgtttctcgtgggagctgccacaggcgcccactctcaagttcacctgacacagtctggccccgaagtgcggaagcctggcacaagcgtgaaggtgtcctgtaaagcccctggcaacaccctgaaaacctacgacctgcactgggtccgatctgtgcctggacaaggactgcagtggatgggctggattagccacgagggcgacaagaaagtgatcgtggaacggttcaaggccaaagtgaccatcgactgggacagaagcaccaacaccgcctacctgcagctgagcggactgacatctggcgataccgccgtgtactactgtgccaagggcagcaagcaccggctgagagattacgccctgtacgacgatgacggcgccctgaattgggccgtcgatgtggactacctgagcaacctggaattctggggccagggaacagccgtgacagtgtctagtgcatctgtggccgctcctagcgtgttcatcttcccacctagcgacgaggaactgaagtctggcacagccagcgtcgtgtgcctgctgaacaacttctaccccagagaagccaaggtgcagtggaaggtggacaacgccctgcagagcggcaatagccaagagagcgtgaccgagcaggacagcaaggactctacctacagcctgagcagcaccctgacactgagcaaggccgactacgagaagcacaaagtgtacgcctgcgaagtgacccaccagggcctttctagccctgtgaccaagagcttcaaccggggcgagtgcgataagacccacacctgtcctccatgtccagctccagaactgctggccggaccttccgtgttcctgtttcctccaaagcctaaggacaccctgatgatcagcagaacccctgaagtgacctgcgtggtggtggatgtgtctcacgaggaccccgaagtgaagttcaattggtacgtggacggcgtggaagtgcacaatgccaagaccaagcctagagaggaacagtacaacagcacctacagagtggtgtccgtgctgaccgtgctgcaccaggattggctgaacggcaaagagtacaagtgcaaggtgtccaacaaggccctgcctctgcctgaggaaaagaccatcagcaaggccaagggccagcctagggaaccccaggtttacacactgcctccaagccgcgacgaactgaccaagaaccaggtgtccctgacctgcctcgtgaagggcttctacccttccgatatcgccgtggaatgggagagcaatggccagcctgagaacaactacaagacaacccctcctgtgctggacagcgacggctcattcttcctgtacagcaagctgaccgtggacaagtccagatggcagcagggcaacgtgttcagctgtagcgtgctgcacgaagccctgcacagccactacacccagaaaagcctgtctctgagccccggcaaatgataa

SEQ ID NO: 301 - DNA, 1488 bp, synthetic construct
  source 1..1488: mol_type = other DNA
atggattggatctggcgcatcctgtttctcgtgggagctgccacaggcgcccactctcaagttcacctgacacagtctggccccgaagtgcggaagcctggcacaagcgtgaaggtgtcctgtaaagcccctggcaacaccctgaaaacctacgacctgcactgggtccgatctgtgcctggacaaggactgcagtggatgggctggattagccacgagggcgacaagaaagtgatcgtggaacggttcaaggccaaagtgaccatcgactgggacagaagcaccaacaccgcctacctgcagctgagcggactgacatctggcgataccgccgtgtactactgtgccaagggcagcaagcaccggctgagagattacgccctgtacgacgatgacggcgccctgaattgggccgtcgatgtggactacctgagcaacctggaattctggggccagggaacagccgtgacagtgtctagtgcatctgtggccgctcctagcgtgttcatcttcccacctagcgacgaggaactgaagtctggcacagccagcgtcgtgtgcctgctgaacaacttctaccccagagaagccaaggtgcagtggaaggtggacaacgccctgcagagcggcaatagccaagagagcgtgaccgagcaggacagcaaggactctacctacagcctgagcagcaccctgacactgagcaaggccgactacgagaagcacaaagtgtacgcctgcgaagtgacccaccagggcctttctagccctgtgaccaagagcttcaaccggggcgagtgcgataagacccacacctgtcctccatgtccagctccagaactgctggccggaccttccgtgttcctgtttcctccaaagcctaaggacaccctgatgatcagcagaacccctgaagtgacctgcgtggtggtggatgtgtctcacgaggaccctgaagtgaagttcaattggtacgtggacggcgtggaagtgcacaacgccaagaccaagcctagagaggaacagtacaacagcacctacagagtggtgtccgtgctgaccgtgctgcaccaggattggctgaacggcaaagagtacaagtgcaaggtgtccaacaaggccctgcctgcccctgaggaaaagaccatcagcaaggccaagggccagcctagggaaccccaggtttacacactgcctccaagccgcgacgaactgaccaagaaccaggtgtccctgacctgcctcgtgaagggcttctacccttccgatatcgccgtggaatgggagagcaatggccagcctgagaacaactacaagacaacccctcctgtgctggacagcgacggctcattcttcctgtacagcaagctgaccgtggacaagtccagatggcagcagggcaacgtgttcagctgtagcgtgctgcacgaagccctgcacagccactacacccagaaaagcctgtctctgagccccggcaaatgataa

SEQ ID NO: 302 - DNA, 1488 bp, synthetic construct
  source 1..1488: mol_type = other DNA
atggattggatctggcgcatcctgtttctcgtgggagctgccacaggcgcccactctcaagttcacctgacacagtctggccccgaagtgcggaagcctggcacaagcgtgaaggtgtcctgtaaagcccctggcaacaccctgaaaacctacgacctgcactgggtccgatctgtgcctggacaaggactgcagtggatgggctggattagccacgagggcgacaagaaagtgatcgtggaacggttcaaggccaaagtgaccatcgactgggacagaagcaccaacaccgcctacctgcagctgagcggactgacatctggcgataccgccgtgtactactgtgccaagggcagcaagcaccggctgagagattacgccctgtacgacgatgacggcgccctgaattgggccgtcgatgtggactacctgagcaacctggaattctggggccagggaacagccgtgacagtgtctagtgcatctgtggccgctcctagcgtgttcatcttcccacctagcgacgaggaactgaagtctggcacagccagcgtcgtgtgcctgctgaacaacttctaccccagagaagccaaggtgcagtggaaggtggacaacgccctgcagagcggcaatagccaagagagcgtgaccgagcaggacagcaaggactctacctacagcctgagcagcaccctgacactgagcaaggccgactacgagaagcacaaagtgtacgcctgcgaagtgacccaccagggcctttctagccctgtgaccaagagcttcaaccggggcgagtgcgataagacccacacctgtcctccatgtccagctccagaactgctggccggaccttccgtgttcctgtttcctccaaagcctaaggacaccctgatgatcagcagaacccctgaagtgacctgcgtggtggtggatgtgtctcacgaggaccctgaagtgaagttcaattggtacgtggacggcgtggaagtgcacaacgccaagaccaagcctagagaggaacagtacaacagcacctacagagtggtgtccgtgctgaccgtgctgcaccaggattggctgaacggcaaagagtacaagtgcaaggtgtccaacaaggccctgcctgcccctatcgaaaagaccatcagcaaggccaagggccagcctagggaaccccaggtttacacactgcctccaagccgcgacgaactgaccaagaaccaggtgtccctgacctgcctcgtgaagggcttctacccttccgatatcgccgtggaatgggagagcaatggccagcctgagaacaactacaagacaacccctcctgtgctggacagcgacggctcattcttcctgtacagcaagctgaccgtggacaagtccagatggcagcagggcaacgtgttcagctgtagcgtgctgcacgaagccctgcacagccactacacccagaaaagcctgtctctgagccccggcaaatgataa

SEQ ID NO: 303 - DNA, 1488 bp, synthetic construct
  source 1..1488: mol_type = other DNA
atggattggatctggcgcatcctgtttctcgtgggagctgccacaggcgcccactctcaagttcacctgacacagtctggccccgaagtgcggaagcctggcacaagcgtgaaggtgtcctgtaaagcccctggcaacaccctgaaaacctacgacctgcactgggtccgatctgtgcctggacaaggactgcagtggatgggctggattagccacgagggcgacaagaaagtgatcgtggaacggttcaaggccaaagtgaccatcgactgggacagaagcaccaacaccgcctacctgcagctgagcggactgacatctggcgataccgccgtgtactactgtgccaagggcagcaagcaccggctgagagattacgccctgtacgacgatgacggcgccctgaattgggccgtcgatgtggactacctgagcaacctggaattctggggccagggaacagccgtgacagtgtctagtgcatctgtggccgctcctagcgtgttcatcttcccacctagcgacgaggaactgaagtctggcacagccagcgtcgtgtgcctgctgaacaacttctaccccagagaagccaaggtgcagtggaaggtggacaacgccctgcagagcggcaatagccaagagagcgtgaccgagcaggacagcaaggactctacctacagcctgagcagcaccctgacactgagcaaggccgactacgagaagcacaaagtgtacgcctgcgaagtgacccaccagggcctttctagccctgtgaccaagagcttcaaccggggcgagtgcgataagacccacacctgtcctccatgtccagctccagaactgctgggcggaccttccgtgttcctgtttcctccaaagcctaaggacaccctgatgatcagcagaacccctgaagtgacctgcgtggtggtggatgtgtctcacgaggaccctgaagtgaagttcaattggtacgtggacggcgtggaagtgcacaacgccaagaccaagcctagagaggaacagtacaacagcacctacagagtggtgtccgtgctgaccgtgctgcaccaggattggctgaacggcaaagagtacaagtgcaaggtgtccaacaaggccctgcctgcccctgaggaaaagaccatcagcaaggccaagggccagcctagggaaccccaggtttacacactgcctccaagccgcgacgaactgaccaagaaccaggtgtccctgacctgcctcgtgaagggcttctacccttccgatatcgccgtggaatgggagagcaatggccagcctgagaacaactacaagacaacccctcctgtgctggacagcgacggctcattcttcctgtacagcaagctgaccgtggacaagtccagatggcagcagggcaacgtgttcagctgtagcgtgctgcacgaagccctgcacagccactacacccagaaaagcctgtctctgagccccggcaaatgataa

SEQ ID NO: 304 - DNA, 1488 bp, synthetic construct
  source 1..1488: mol_type = other DNA
atggattggatctggcgcatcctgtttctcgtgggagctgccacaggcgcccactctcaagttcacctgacacagtctggccccgaagtgcggaagcctggcacaagcgtgaaggtgtcctgtaaagcccctggcaacaccctgaaaacctacgacctgcactgggtccgatctgtgcctggacaaggactgcagtggatgggctggattagccacgagggcgacaagaaagtgatcgtggaacggttcaaggccaaagtgaccatcgactgggacagaagcaccaacaccgcctacctgcagctgagcggactgacatctggcgataccgccgtgtactactgtgccaagggcagcaagcaccggctgagagattacgccctgtacgacgatgacggcgccctgaattgggccgtcgatgtggactacctgagcaacctggaattctggggccagggaacagccgtgacagtgtctagtgcatctgtggccgctcctagcgtgttcatcttcccacctagcgacgaggaactgaagtctggcacagccagcgtcgtgtgcctgctgaacaacttctaccccagagaagccaaggtgcagtggaaggtggacaacgccctgcagagcggcaatagccaagagagcgtgaccgagcaggacagcaaggactctacctacagcctgagcagcaccctgacactgagcaaggccgactacgagaagcacaaagtgtacgcctgcgaagtgacccaccagggcctttctagccctgtgaccaagagcttcaaccggggcgagtgcgataagacccacacctgtcctccatgtccagctccagaactgctcggcggaccttccgtgttcctgtttcctccaaagcctaaggacaccctgatgatcagcagaacccctgaagtgacctgcgtggtggtggatgtgtctcacgaggaccccgaagtgaagttcaattggtacgtggacggcgtggaagtgcacaacgccaagaccaagcctagagaggaacagtacaacagcacctacagagtggtgtccgtgctgacagtgctgcaccaggattggctgaacggcaaagagtacaagtgcaaggtgtccaacaaggccctgcctgctcctatcgagaaaaccatcagcaaggccaagggccagcctcgcgaacctcaagtctgtacactgcctcctagccgcgacgaactgaccaagaaccaggtgtccctgagctgcgccgtgaagggcttttacccttccgatatcgccgtggaatgggagagcaatggccagcctgagaacaactacaagacaacccctcctgtgctggacagcgacggctcattcttcctggtgtccaagctgacagtggacaagagcagatggcagcagggcaacgtgttcagctgcagcgtgctgcatgaagccctgcacagccactacacccagaagtccctgtctctgagccccggcaagtgataa

SEQ ID NO: 305 - DNA, 1488 bp, synthetic construct
  source 1..1488: mol_type = other DNA
atggattggatctggcgcatcctgtttctcgtgggagctgccacaggcgcccactctcaagttcacctgacacagtctggccccgaagtgcggaagcctggcacaagcgtgaaggtgtcctgtaaagcccctggcaacaccctgaaaacctacgacctgcactgggtccgatctgtgcctggacaaggactgcagtggatgggctggattagccacgagggcgacaagaaagtgatcgtggaacggttcaaggccaaagtgaccatcgactgggacagaagcaccaacaccgcctacctgcagctgagcggactgacatctggcgataccgccgtgtactactgtgccaagggcagcaagcaccggctgagagattacgccctgtacgacgatgacggcgccctgaattgggccgtcgatgtggactacctgagcaacctggaattctggggccagggaacagccgtgacagtgtctagtgcatctgtggccgctcctagcgtgttcatcttcccacctagcgacgaggaactgaagtctggcacagccagcgtcgtgtgcctgctgaacaacttctaccccagagaagccaaggtgcagtggaaggtggacaacgccctgcagagcggcaatagccaagagagcgtgaccgagcaggacagcaaggactctacctacagcctgagcagcaccctgacactgagcaaggccgactacgagaagcacaaagtgtacgcctgcgaagtgacccaccagggcctttctagccctgtgaccaagagcttcaaccggggcgagtgcgataagacccacacctgtcctccatgtccagctccagaactgctggccggaccttccgtgttcctgtttcctccaaagcctaaggacaccctgatgatcagcagaacccctgaagtgacctgcgtggtggtggatgtgtctcacgaggaccccgaagtgaagttcaattggtacgtggacggcgtggaagtgcacaatgccaagaccaagcctagagaggaacagtacaacagcacctacagagtggtgtccgtgctgaccgtgctgcaccaggattggctgaacggcaaagagtacaagtgcaaggtgtccaacaaggccctgcctctgcctgaggaaaagaccatcagcaaggccaagggccagcctcgcgaacctcaagtctgtacactgcctcctagccgcgacgaactgaccaagaaccaggtgtccctgagctgcgccgtgaagggcttttacccttccgatatcgccgtggaatgggagagcaatggccagcctgagaacaactacaagacaacccctcctgtgctggacagcgacggctcattcttcctggtgtccaagctgacagtggacaagagcagatggcagcagggcaacgtgttcagctgcagcgtgctgcatgaagccctgcacagccactacacccagaagtccctgtctctgagccccggcaagtgataa

SEQ ID NO: 306 - DNA, 1488 bp, synthetic construct
  source 1..1488: mol_type = other DNA
atggattggatctggcgcatcctgtttctcgtgggagctgccacaggcgcccactctcaagttcacctgacacagtctggccccgaagtgcggaagcctggcacaagcgtgaaggtgtcctgtaaagcccctggcaacaccctgaaaacctacgacctgcactgggtccgatctgtgcctggacaaggactgcagtggatgggctggattagccacgagggcgacaagaaagtgatcgtggaacggttcaaggccaaagtgaccatcgactgggacagaagcaccaacaccgcctacctgcagctgagcggactgacatctggcgataccgccgtgtactactgtgccaagggcagcaagcaccggctgagagattacgccctgtacgacgatgacggcgccctgaattgggccgtcgatgtggactacctgagcaacctggaattctggggccagggaacagccgtgacagtgtctagtgcatctgtggccgctcctagcgtgttcatcttcccacctagcgacgaggaactgaagtctggcacagccagcgtcgtgtgcctgctgaacaacttctaccccagagaagccaaggtgcagtggaaggtggacaacgccctgcagagcggcaatagccaagagagcgtgaccgagcaggacagcaaggactctacctacagcctgagcagcaccctgacactgagcaaggccgactacgagaagcacaaagtgtacgcctgcgaagtgacccaccagggcctttctagccctgtgaccaagagcttcaaccggggcgagtgcgataagacccacacctgtcctccatgtccagctccagaactgctggccggaccttccgtgttcctgtttcctccaaagcctaaggacaccctgatgatcagcagaacccctgaagtgacctgcgtggtggtggatgtgtctcacgaggaccctgaagtgaagttcaattggtacgtggacggcgtggaagtgcacaacgccaagaccaagcctagagaggaacagtacaacagcacctacagagtggtgtccgtgctgaccgtgctgcaccaggattggctgaacggcaaagagtacaagtgcaaggtgtccaacaaggccctgcctgcccctgaggaaaagaccatcagcaaggccaagggccagcctcgcgaacctcaagtctgtacactgcctcctagccgcgacgaactgaccaagaaccaggtgtccctgagctgcgccgtgaagggcttttacccttccgatatcgccgtggaatgggagagcaatggccagcctgagaacaactacaagacaacccctcctgtgctggacagcgacggctcattcttcctggtgtccaagctgacagtggacaagagcagatggcagcagggcaacgtgttcagctgcagcgtgctgcatgaagccctgcacagccactacacccagaagtccctgtctctgagccccggcaagtgataa

SEQ ID NO: 307 - DNA, 1488 bp, synthetic construct
  source 1..1488: mol_type = other DNA
atggattggatctggcgcatcctgtttctcgtgggagctgccacaggcgcccactctcaagttcacctgacacagtctggccccgaagtgcggaagcctggcacaagcgtgaaggtgtcctgtaaagcccctggcaacaccctgaaaacctacgacctgcactgggtccgatctgtgcctggacaaggactgcagtggatgggctggattagccacgagggcgacaagaaagtgatcgtggaacggttcaaggccaaagtgaccatcgactgggacagaagcaccaacaccgcctacctgcagctgagcggactgacatctggcgataccgccgtgtactactgtgccaagggcagcaagcaccggctgagagattacgccctgtacgacgatgacggcgccctgaattgggccgtcgatgtggactacctgagcaacctggaattctggggccagggaacagccgtgacagtgtctagtgcatctgtggccgctcctagcgtgttcatcttcccacctagcgacgaggaactgaagtctggcacagccagcgtcgtgtgcctgctgaacaacttctaccccagagaagccaaggtgcagtggaaggtggacaacgccctgcagagcggcaatagccaagagagcgtgaccgagcaggacagcaaggactctacctacagcctgagcagcaccctgacactgagcaaggccgactacgagaagcacaaagtgtacgcctgcgaagtgacccaccagggcctttctagccctgtgaccaagagcttcaaccggggcgagtgcgataagacccacacctgtcctccatgtccagctccagaactgctggccggaccttccgtgttcctgtttcctccaaagcctaaggacaccctgatgatcagcagaacccctgaagtgacctgcgtggtggtggatgtgtctcacgaggaccctgaagtgaagttcaattggtacgtggacggcgtggaagtgcacaacgccaagaccaagcctagagaggaacagtacaacagcacctacagagtggtgtccgtgctgaccgtgctgcaccaggattggctgaacggcaaagagtacaagtgcaaggtgtccaacaaggccctgcctgcccctatcgaaaagaccatcagcaaggccaagggccagcctcgcgaacctcaagtctgtacactgcctcctagccgcgacgaactgaccaagaaccaggtgtccctgagctgcgccgtgaagggcttttacccttccgatatcgccgtggaatgggagagcaatggccagcctgagaacaactacaagacaacccctcctgtgctggacagcgacggctcattcttcctggtgtccaagctgacagtggacaagagcagatggcagcagggcaacgtgttcagctgcagcgtgctgcatgaagccctgcacagccactacacccagaagtccctgtctctgagccccggcaagtgataa

SEQ ID NO: 308 - DNA, 1488 bp, synthetic construct
  source 1..1488: mol_type = other DNA
atggattggatctggcgcatcctgtttctcgtgggagctgccacaggcgcccactctcaagttcacctgacacagtctggccccgaagtgcggaagcctggcacaagcgtgaaggtgtcctgtaaagcccctggcaacaccctgaaaacctacgacctgcactgggtccgatctgtgcctggacaaggactgcagtggatgggctggattagccacgagggcgacaagaaagtgatcgtggaacggttcaaggccaaagtgaccatcgactgggacagaagcaccaacaccgcctacctgcagctgagcggactgacatctggcgataccgccgtgtactactgtgccaagggcagcaagcaccggctgagagattacgccctgtacgacgatgacggcgccctgaattgggccgtcgatgtggactacctgagcaacctggaattctggggccagggaacagccgtgacagtgtctagtgcatctgtggccgctcctagcgtgttcatcttcccacctagcgacgaggaactgaagtctggcacagccagcgtcgtgtgcctgctgaacaacttctaccccagagaagccaaggtgcagtggaaggtggacaacgccctgcagagcggcaatagccaagagagcgtgaccgagcaggacagcaaggactctacctacagcctgagcagcaccctgacactgagcaaggccgactacgagaagcacaaagtgtacgcctgcgaagtgacccaccagggcctttctagccctgtgaccaagagcttcaaccggggcgagtgcgataagacccacacctgtcctccatgtccagctccagaactgctgggcggaccttccgtgttcctgtttcctccaaagcctaaggacaccctgatgatcagcagaacccctgaagtgacctgcgtggtggtggatgtgtctcacgaggaccctgaagtgaagttcaattggtacgtggacggcgtggaagtgcacaacgccaagaccaagcctagagaggaacagtacaacagcacctacagagtggtgtccgtgctgaccgtgctgcaccaggattggctgaacggcaaagagtacaagtgcaaggtgtccaacaaggccctgcctgcccctgaggaaaagaccatcagcaaggccaagggccagcctcgcgaacctcaagtctgtacactgcctcctagccgcgacgaactgaccaagaaccaggtgtccctgagctgcgccgtgaagggcttttacccttccgatatcgccgtggaatgggagagcaatggccagcctgagaacaactacaagacaacccctcctgtgctggacagcgacggctcattcttcctggtgtccaagctgacagtggacaagagcagatggcagcagggcaacgtgttcagctgcagcgtgctgcatgaagccctgcacagccactacacccagaagtccctgtctctgagccccggcaagtgataa

SEQ ID NO: 309 - DNA, 1488 bp, synthetic construct
  source 1..1488: mol_type = other DNA
atggattggatctggcgcatcctgtttctcgtgggagctgccacaggcgcccactctcaagttcacctgacacagtctggccccgaagtgcggaagcctggcacaagcgtgaaggtgtcctgtaaagcccctggcaacaccctgaaaacctacgacctgcactgggtccgatctgtgcctggacaaggactgcagtggatgggctggattagccacgagggcgacaagaaagtgatcgtggaacggttcaaggccaaagtgaccatcgactgggacagaagcaccaacaccgcctacctgcagctgagcggactgacatctggcgataccgccgtgtactactgtgccaagggcagcaagcaccggctgagagattacgccctgtacgacgatgacggcgccctgaattgggccgtcgatgtggactacctgagcaacctggaattctggggccagggaacagccgtgacagtgtctagtgcatctgtggccgctcctagcgtgttcatcttcccacctagcgacgaggaactgaagtctggcacagccagcgtcgtgtgcctgctgaacaacttctaccccagagaagccaaggtgcagtggaaggtggacaacgccctgcagagcggcaatagccaagagagcgtgaccgagcaggacagcaaggactctacctacagcctgagcagcaccctgacactgagcaaggccgactacgagaagcacaaagtgtacgcctgcgaagtgacccaccagggcctttctagccctgtgaccaagagcttcaaccggggcgagtgcgataagacccacacctgtcctccatgtccagctccagaactgctcggcggaccttccgtgttcctgtttcctccaaagcctaaggacaccctgatgatcagcagaacccctgaagtgacctgcgtggtggtggatgtgtctcacgaggaccccgaagtgaagttcaattggtacgtggacggcgtggaagtgcacaacgccaagaccaagcctagagaggaacagtacaacagcacctacagagtggtgtccgtgctgacagtgctgcaccaggattggctgaacggcaaagagtacaagtgcaaggtgtccaacaaggccctgcctgctcctatcgagaaaaccatcagcaaggccaagggccagcctagggaaccccaggtttacaccctgcctccatgccgcgacgaactgaccaagaaccaggtgtccctgtggtgcctggtcaagggcttctacccttccgatatcgccgtggaatgggagagcaatggccagcctgagaacaactacaagacaacccctcctgtgctggacagcgacggctcattcttcctgtacagcaagctgacagtggacaagagcagatggcagcagggcaacgtgttcagctgcagcgtgctgcatgaagccctgcacagccactacacccagaagtccctgtctctgagccccggcaagtgataa

SEQ ID NO: 310 - DNA, 1488 bp, synthetic construct
  source 1..1488: mol_type = other DNA
atggattggatctggcgcatcctgtttctcgtgggagctgccacaggcgcccactctcaagttcacctgacacagtctggccccgaagtgcggaagcctggcacaagcgtgaaggtgtcctgtaaagcccctggcaacaccctgaaaacctacgacctgcactgggtccgatctgtgcctggacaaggactgcagtggatgggctggattagccacgagggcgacaagaaagtgatcgtggaacggttcaaggccaaagtgaccatcgactgggacagaagcaccaacaccgcctacctgcagctgagcggactgacatctggcgataccgccgtgtactactgtgccaagggcagcaagcaccggctgagagattacgccctgtacgacgatgacggcgccctgaattgggccgtcgatgtggactacctgagcaacctggaattctggggccagggaacagccgtgacagtgtctagtgcatctgtggccgctcctagcgtgttcatcttcccacctagcgacgaggaactgaagtctggcacagccagcgtcgtgtgcctgctgaacaacttctaccccagagaagccaaggtgcagtggaaggtggacaacgccctgcagagcggcaatagccaagagagcgtgaccgagcaggacagcaaggactctacctacagcctgagcagcaccctgacactgagcaaggccgactacgagaagcacaaagtgtacgcctgcgaagtgacccaccagggcctttctagccctgtgaccaagagcttcaaccggggcgagtgcgataagacccacacctgtcctccatgtccagctccagaactgctggccggaccttccgtgttcctgtttcctccaaagcctaaggacaccctgatgatcagcagaacccctgaagtgacctgcgtggtggtggatgtgtctcacgaggaccccgaagtgaagttcaattggtacgtggacggcgtggaagtgcacaatgccaagaccaagcctagagaggaacagtacaacagcacctacagagtggtgtccgtgctgaccgtgctgcaccaggattggctgaacggcaaagagtacaagtgcaaggtgtccaacaaggccctgcctctgcctgaggaaaagaccatcagcaaggccaagggccagcctagggaaccccaggtttacaccctgcctccatgccgcgacgaactgaccaagaaccaggtgtccctgtggtgcctggtcaagggcttctacccttccgatatcgccgtggaatgggagagcaatggccagcctgagaacaactacaagacaacccctcctgtgctggacagcgacggctcattcttcctgtacagcaagctgacagtggacaagagcagatggcagcagggcaacgtgttcagctgcagcgtgctgcatgaagccctgcacagccactacacccagaagtccctgtctctgagccccggcaagtgataa

SEQ ID NO: 311 - DNA, 1488 bp, synthetic construct
  source 1..1488: mol_type = other DNA
atggattggatctggcgcatcctgtttctcgtgggagctgccacaggcgcccactctcaagttcacctgacacagtctggccccgaagtgcggaagcctggcacaagcgtgaaggtgtcctgtaaagcccctggcaacaccctgaaaacctacgacctgcactgggtccgatctgtgcctggacaaggactgcagtggatgggctggattagccacgagggcgacaagaaagtgatcgtggaacggttcaaggccaaagtgaccatcgactgggacagaagcaccaacaccgcctacctgcagctgagcggactgacatctggcgataccgccgtgtactactgtgccaagggcagcaagcaccggctgagagattacgccctgtacgacgatgacggcgccctgaattgggccgtcgatgtggactacctgagcaacctggaattctggggccagggaacagccgtgacagtgtctagtgcatctgtggccgctcctagcgtgttcatcttcccacctagcgacgaggaactgaagtctggcacagccagcgtcgtgtgcctgctgaacaacttctaccccagagaagccaaggtgcagtggaaggtggacaacgccctgcagagcggcaatagccaagagagcgtgaccgagcaggacagcaaggactctacctacagcctgagcagcaccctgacactgagcaaggccgactacgagaagcacaaagtgtacgcctgcgaagtgacccaccagggcctttctagccctgtgaccaagagcttcaaccggggcgagtgcgataagacccacacctgtcctccatgtccagctccagaactgctggccggaccttccgtgttcctgtttcctccaaagcctaaggacaccctgatgatcagcagaacccctgaagtgacctgcgtggtggtggatgtgtctcacgaggaccctgaagtgaagttcaattggtacgtggacggcgtggaagtgcacaacgccaagaccaagcctagagaggaacagtacaacagcacctacagagtggtgtccgtgctgaccgtgctgcaccaggattggctgaacggcaaagagtacaagtgcaaggtgtccaacaaggccctgcctgcccctgaggaaaagaccatcagcaaggccaagggccagcctagggaaccccaggtttacaccctgcctccatgccgcgacgaactgaccaagaaccaggtgtccctgtggtgcctggtcaagggcttctacccttccgatatcgccgtggaatgggagagcaatggccagcctgagaacaactacaagacaacccctcctgtgctggacagcgacggctcattcttcctgtacagcaagctgacagtggacaagagcagatggcagcagggcaacgtgttcagctgcagcgtgctgcatgaagccctgcacagccactacacccagaagtccctgtctctgagccccggcaagtgataa

SEQ ID NO: 312 - DNA, 1488 bp, synthetic construct
  source 1..1488: mol_type = other DNA
atggattggatctggcgcatcctgtttctcgtgggagctgccacaggcgcccactctcaagttcacctgacacagtctggccccgaagtgcggaagcctggcacaagcgtgaaggtgtcctgtaaagcccctggcaacaccctgaaaacctacgacctgcactgggtccgatctgtgcctggacaaggactgcagtggatgggctggattagccacgagggcgacaagaaagtgatcgtggaacggttcaaggccaaagtgaccatcgactgggacagaagcaccaacaccgcctacctgcagctgagcggactgacatctggcgataccgccgtgtactactgtgccaagggcagcaagcaccggctgagagattacgccctgtacgacgatgacggcgccctgaattgggccgtcgatgtggactacctgagcaacctggaattctggggccagggaacagccgtgacagtgtctagtgcatctgtggccgctcctagcgtgttcatcttcccacctagcgacgaggaactgaagtctggcacagccagcgtcgtgtgcctgctgaacaacttctaccccagagaagccaaggtgcagtggaaggtggacaacgccctgcagagcggcaatagccaagagagcgtgaccgagcaggacagcaaggactctacctacagcctgagcagcaccctgacactgagcaaggccgactacgagaagcacaaagtgtacgcctgcgaagtgacccaccagggcctttctagccctgtgaccaagagcttcaaccggggcgagtgcgataagacccacacctgtcctccatgtccagctccagaactgctggccggaccttccgtgttcctgtttcctccaaagcctaaggacaccctgatgatcagcagaacccctgaagtgacctgcgtggtggtggatgtgtctcacgaggaccctgaagtgaagttcaattggtacgtggacggcgtggaagtgcacaacgccaagaccaagcctagagaggaacagtacaacagcacctacagagtggtgtccgtgctgaccgtgctgcaccaggattggctgaacggcaaagagtacaagtgcaaggtgtccaacaaggccctgcctgcccctatcgaaaagaccatcagcaaggccaagggccagcctagggaaccccaggtttacaccctgcctccatgccgcgacgaactgaccaagaaccaggtgtccctgtggtgcctggtcaagggcttctacccttccgatatcgccgtggaatgggagagcaatggccagcctgagaacaactacaagacaacccctcctgtgctggacagcgacggctcattcttcctgtacagcaagctgacagtggacaagagcagatggcagcagggcaacgtgttcagctgcagcgtgctgcatgaagccctgcacagccactacacccagaagtccctgtctctgagccccggcaagtgataa

SEQ ID NO: 313 - DNA, 1488 bp, synthetic construct
  source 1..1488: mol_type = other DNA
atggattggatctggcgcatcctgtttctcgtgggagctgccacaggcgcccactctcaagttcacctgacacagtctggccccgaagtgcggaagcctggcacaagcgtgaaggtgtcctgtaaagcccctggcaacaccctgaaaacctacgacctgcactgggtccgatctgtgcctggacaaggactgcagtggatgggctggattagccacgagggcgacaagaaagtgatcgtggaacggttcaaggccaaagtgaccatcgactgggacagaagcaccaacaccgcctacctgcagctgagcggactgacatctggcgataccgccgtgtactactgtgccaagggcagcaagcaccggctgagagattacgccctgtacgacgatgacggcgccctgaattgggccgtcgatgtggactacctgagcaacctggaattctggggccagggaacagccgtgacagtgtctagtgcatctgtggccgctcctagcgtgttcatcttcccacctagcgacgaggaactgaagtctggcacagccagcgtcgtgtgcctgctgaacaacttctaccccagagaagccaaggtgcagtggaaggtggacaacgccctgcagagcggcaatagccaagagagcgtgaccgagcaggacagcaaggactctacctacagcctgagcagcaccctgacactgagcaaggccgactacgagaagcacaaagtgtacgcctgcgaagtgacccaccagggcctttctagccctgtgaccaagagcttcaaccggggcgagtgcgataagacccacacctgtcctccatgtccagctccagaactgctgggcggaccttccgtgttcctgtttcctccaaagcctaaggacaccctgatgatcagcagaacccctgaagtgacctgcgtggtggtggatgtgtctcacgaggaccctgaagtgaagttcaattggtacgtggacggcgtggaagtgcacaacgccaagaccaagcctagagaggaacagtacaacagcacctacagagtggtgtccgtgctgaccgtgctgcaccaggattggctgaacggcaaagagtacaagtgcaaggtgtccaacaaggccctgcctgcccctgaggaaaagaccatcagcaaggccaagggccagcctagggaaccccaggtttacaccctgcctccatgccgcgacgaactgaccaagaaccaggtgtccctgtggtgcctggtcaagggcttctacccttccgatatcgccgtggaatgggagagcaatggccagcctgagaacaactacaagacaacccctcctgtgctggacagcgacggctcattcttcctgtacagcaagctgacagtggacaagagcagatggcagcagggcaacgtgttcagctgcagcgtgctgcatgaagccctgcacagccactacacccagaagtccctgtctctgagccccggcaagtgataa

SEQ ID NO: 314 - RNA, 1488 nt, synthetic construct
  source 1..1488: mol_type = other RNA
atggattggatctggcgcatcctgtttctcgtgggagctgccacaggcgcccactctcaagttcacctgacacagtctggccccgaagtgcggaagcctggcacaagcgtgaaggtgtcctgtaaagcccctggcaacaccctgaaaacctacgacctgcactgggtccgatctgtgcctggacaaggactgcagtggatgggctggattagccacgagggcgacaagaaagtgatcgtggaacggttcaaggccaaagtgaccatcgactgggacagaagcaccaacaccgcctacctgcagctgagcggactgacatctggcgataccgccgtgtactactgtgccaagggcagcaagcaccggctgagagattacgccctgtacgacgatgacggcgccctgaattgggccgtcgatgtggactacctgagcaacctggaattctggggccagggaacagccgtgacagtgtctagtgcatctgtggccgctcctagcgtgttcatcttcccacctagcgacgaggaactgaagtctggcacagccagcgtcgtgtgcctgctgaacaacttctaccccagagaagccaaggtgcagtggaaggtggacaacgccctgcagagcggcaatagccaagagagcgtgaccgagcaggacagcaaggactctacctacagcctgagcagcaccctgacactgagcaaggccgactacgagaagcacaaagtgtacgcctgcgaagtgacccaccagggcctttctagccctgtgaccaagagcttcaaccggggcgagtgcgataagacccacacctgtcctccatgtccagctccagaactgctcggcggaccttccgtgttcctgtttcctccaaagcctaaggacaccctgatgatcagcagaacccctgaagtgacctgcgtggtggtggatgtgtctcacgaggaccccgaagtgaagttcaattggtacgtggacggcgtggaagtgcacaacgccaagaccaagcctagagaggaacagtacaacagcacctacagagtggtgtccgtgctgacagtgctgcaccaggattggctgaacggcaaagagtacaagtgcaaggtgtccaacaaggccctgcctgctcctatcgagaaaaccatcagcaaggccaagggccagcctagggaaccccaggtttacacactgcctccaagccgcgaggaaatgaccaagaaccaggtgtccctgacctgcctcgtgaagggcttctacccttccgatatcgccgtggaatgggagagcaatggccagcctgagaacaactacaagacaacccctcctgtgctggacagcgacggctcattcttcctgtacagcaagctgactgtggataagtcccggtggcagcagggcaacgtgttcagctgttctgtgatgcacgaagccctgcacaaccactacacccagaaaagcctgtctctgagccccggcaagtgataa

SEQ ID NO: 315 - RNA, 1488 nt, synthetic construct
  source 1..1488: mol_type = other RNA
atggattggatctggcgcatcctgtttctcgtgggagctgccacaggcgcccactctcaagttcacctgacacagtctggccccgaagtgcggaagcctggcacaagcgtgaaggtgtcctgtaaagcccctggcaacaccctgaaaacctacgacctgcactgggtccgatctgtgcctggacaaggactgcagtggatgggctggattagccacgagggcgacaagaaagtgatcgtggaacggttcaaggccaaagtgaccatcgactgggacagaagcaccaacaccgcctacctgcagctgagcggactgacatctggcgataccgccgtgtactactgtgccaagggcagcaagcaccggctgagagattacgccctgtacgacgatgacggcgccctgaattgggccgtcgatgtggactacctgagcaacctggaattctggggccagggaacagccgtgacagtgtctagtgcatctgtggccgctcctagcgtgttcatcttcccacctagcgacgaggaactgaagtctggcacagccagcgtcgtgtgcctgctgaacaacttctaccccagagaagccaaggtgcagtggaaggtggacaacgccctgcagagcggcaatagccaagagagcgtgaccgagcaggacagcaaggactctacctacagcctgagcagcaccctgacactgagcaaggccgactacgagaagcacaaagtgtacgcctgcgaagtgacccaccagggcctttctagccctgtgaccaagagcttcaaccggggcgagtgcgataagacccacacctgtcctccatgtccagctccagaactgctcggcggaccttccgtgttcctgtttcctccaaagcctaaggacaccctgatgatcagcagaacccctgaagtgacctgcgtggtggtggatgtgtctcacgaggaccccgaagtgaagttcaattggtacgtggacggcgtggaagtgcacaacgccaagaccaagcctagagaggaacagtacaacagcacctacagagtggtgtccgtgctgacagtgctgcaccaggattggctgaacggcaaagagtacaagtgcaaggtgtccaacaaggccctgcctgctcctatcgagaaaaccatcagcaaggccaagggccagcctagggaaccccaggtttacacactgcctccaagccgcgaggaaatgaccaagaaccaggtgtccctgacctgcctcgtgaagggcttctacccttccgatatcgccgtggaatgggagagcaatggccagcctgagaacaactacaagacaacccctcctgtgctggacagcgacggctcattcttcctgtacagcaagctgaccgtggacaagtccagatggcagcagggcaacgtgttcagctgtagcgtgctgcacgaagccctgcacagccactacacccagaaaagcctgtctctgagccccggcaaatgataa

SEQ ID NO: 316 - RNA, 1488 nt, synthetic construct
  source 1..1488: mol_type = other RNA
atggattggatctggcgcatcctgtttctcgtgggagctgccacaggcgcccactctcaagttcacctgacacagtctggccccgaagtgcggaagcctggcacaagcgtgaaggtgtcctgtaaagcccctggcaacaccctgaaaacctacgacctgcactgggtccgatctgtgcctggacaaggactgcagtggatgggctggattagccacgagggcgacaagaaagtgatcgtggaacggttcaaggccaaagtgaccatcgactgggacagaagcaccaacaccgcctacctgcagctgagcggactgacatctggcgataccgccgtgtactactgtgccaagggcagcaagcaccggctgagagattacgccctgtacgacgatgacggcgccctgaattgggccgtcgatgtggactacctgagcaacctggaattctggggccagggaacagccgtgacagtgtctagtgcatctgtggccgctcctagcgtgttcatcttcccacctagcgacgaggaactgaagtctggcacagccagcgtcgtgtgcctgctgaacaacttctaccccagagaagccaaggtgcagtggaaggtggacaacgccctgcagagcggcaatagccaagagagcgtgaccgagcaggacagcaaggactctacctacagcctgagcagcaccctgacactgagcaaggccgactacgagaagcacaaagtgtacgcctgcgaagtgacccaccagggcctttctagccctgtgaccaagagcttcaaccggggcgagtgcgataagacccacacctgtcctccatgtccagctccagaactgctggccggaccttccgtgttcctgtttcctccaaagcctaaggacaccctgatgatcagcagaacccctgaagtgacctgcgtggtggtggatgtgtctcacgaggaccccgaagtgaagttcaattggtacgtggacggcgtggaagtgcacaatgccaagaccaagcctagagaggaacagtacaacagcacctacagagtggtgtccgtgctgaccgtgctgcaccaggattggctgaacggcaaagagtacaagtgcaaggtgtccaacaaggccctgcctctgcctgaggaaaagaccatcagcaaggccaagggccagcctagggaaccccaggtttacacactgcctccaagccgcgaggaaatgaccaagaaccaggtgtccctgacctgcctcgtgaagggcttctacccttccgatatcgccgtggaatgggagagcaatggccagcctgagaacaactacaagacaacccctcctgtgctggacagcgacggctcattcttcctgtacagcaagctgaccgtggacaagtccagatggcagcagggcaacgtgttcagctgtagcgtgctgcacgaagccctgcacagccactacacccagaaaagcctgtctctgagccccggcaaatgataa

SEQ ID NO: 317 - RNA, 1488 nt, synthetic construct
  source 1..1488: mol_type = other RNA
atggattggatctggcgcatcctgtttctcgtgggagctgccacaggcgcccactctcaagttcacctgacacagtctggccccgaagtgcggaagcctggcacaagcgtgaaggtgtcctgtaaagcccctggcaacaccctgaaaacctacgacctgcactgggtccgatctgtgcctggacaaggactgcagtggatgggctggattagccacgagggcgacaagaaagtgatcgtggaacggttcaaggccaaagtgaccatcgactgggacagaagcaccaacaccgcctacctgcagctgagcggactgacatctggcgataccgccgtgtactactgtgccaagggcagcaagcaccggctgagagattacgccctgtacgacgatgacggcgccctgaattgggccgtcgatgtggactacctgagcaacctggaattctggggccagggaacagccgtgacagtgtctagtgcatctgtggccgctcctagcgtgttcatcttcccacctagcgacgaggaactgaagtctggcacagccagcgtcgtgtgcctgctgaacaacttctaccccagagaagccaaggtgcagtggaaggtggacaacgccctgcagagcggcaatagccaagagagcgtgaccgagcaggacagcaaggactctacctacagcctgagcagcaccctgacactgagcaaggccgactacgagaagcacaaagtgtacgcctgcgaagtgacccaccagggcctttctagccctgtgaccaagagcttcaaccggggcgagtgcgataagacccacacctgtcctccatgtccagctccagaactgctggccggaccttccgtgttcctgtttcctccaaagcctaaggacaccctgatgatcagcagaacccctgaagtgacctgcgtggtggtggatgtgtctcacgaggaccctgaagtgaagttcaattggtacgtggacggcgtggaagtgcacaacgccaagaccaagcctagagaggaacagtacaacagcacctacagagtggtgtccgtgctgaccgtgctgcaccaggattggctgaacggcaaagagtacaagtgcaaggtgtccaacaaggccctgcctgcccctgaggaaaagaccatcagcaaggccaagggccagcctagggaaccccaggtttacacactgcctccaagccgcgaggaaatgaccaagaaccaggtgtccctgacctgcctcgtgaagggcttctacccttccgatatcgccgtggaatgggagagcaatggccagcctgagaacaactacaagacaacccctcctgtgctggacagcgacggctcattcttcctgtacagcaagctgaccgtggacaagtccagatggcagcagggcaacgtgttcagctgtagcgtgctgcacgaagccctgcacagccactacacccagaaaagcctgtctctgagccccggcaaatgataa

SEQ ID NO: 318 - RNA, 1488 nt, synthetic construct
  source 1..1488: mol_type = other RNA
atggattggatctggcgcatcctgtttctcgtgggagctgccacaggcgcccactctcaagttcacctgacacagtctggccccgaagtgcggaagcctggcacaagcgtgaaggtgtcctgtaaagcccctggcaacaccctgaaaacctacgacctgcactgggtccgatctgtgcctggacaaggactgcagtggatgggctggattagccacgagggcgacaagaaagtgatcgtggaacggttcaaggccaaagtgaccatcgactgggacagaagcaccaacaccgcctacctgcagctgagcggactgacatctggcgataccgccgtgtactactgtgccaagggcagcaagcaccggctgagagattacgccctgtacgacgatgacggcgccctgaattgggccgtcgatgtggactacctgagcaacctggaattctggggccagggaacagccgtgacagtgtctagtgcatctgtggccgctcctagcgtgttcatcttcccacctagcgacgaggaactgaagtctggcacagccagcgtcgtgtgcctgctgaacaacttctaccccagagaagccaaggtgcagtggaaggtggacaacgccctgcagagcggcaatagccaagagagcgtgaccgagcaggacagcaaggactctacctacagcctgagcagcaccctgacactgagcaaggccgactacgagaagcacaaagtgtacgcctgcgaagtgacccaccagggcctttctagccctgtgaccaagagcttcaaccggggcgagtgcgataagacccacacctgtcctccatgtccagctccagaactgctggccggaccttccgtgttcctgtttcctccaaagcctaaggacaccctgatgatcagcagaacccctgaagtgacctgcgtggtggtggatgtgtctcacgaggaccctgaagtgaagttcaattggtacgtggacggcgtggaagtgcacaacgccaagaccaagcctagagaggaacagtacaacagcacctacagagtggtgtccgtgctgaccgtgctgcaccaggattggctgaacggcaaagagtacaagtgcaaggtgtccaacaaggccctgcctgcccctatcgaaaagaccatcagcaaggccaagggccagcctagggaaccccaggtttacacactgcctccaagccgcgaggaaatgaccaagaaccaggtgtccctgacctgcctcgtgaagggcttctacccttccgatatcgccgtggaatgggagagcaatggccagcctgagaacaactacaagacaacccctcctgtgctggacagcgacggctcattcttcctgtacagcaagctgaccgtggacaagtccagatggcagcagggcaacgtgttcagctgtagcgtgctgcacgaagccctgcacagccactacacccagaaaagcctgtctctgagccccggcaaatgataa

SEQ ID NO: 319 - RNA, 1488 nt, synthetic construct
  source 1..1488: mol_type = other RNA
atggattggatctggcgcatcctgtttctcgtgggagctgccacaggcgcccactctcaagttcacctgacacagtctggccccgaagtgcggaagcctggcacaagcgtgaaggtgtcctgtaaagcccctggcaacaccctgaaaacctacgacctgcactgggtccgatctgtgcctggacaaggactgcagtggatgggctggattagccacgagggcgacaagaaagtgatcgtggaacggttcaaggccaaagtgaccatcgactgggacagaagcaccaacaccgcctacctgcagctgagcggactgacatctggcgataccgccgtgtactactgtgccaagggcagcaagcaccggctgagagattacgccctgtacgacgatgacggcgccctgaattgggccgtcgatgtggactacctgagcaacctggaattctggggccagggaacagccgtgacagtgtctagtgcatctgtggccgctcctagcgtgttcatcttcccacctagcgacgaggaactgaagtctggcacagccagcgtcgtgtgcctgctgaacaacttctaccccagagaagccaaggtgcagtggaaggtggacaacgccctgcagagcggcaatagccaagagagcgtgaccgagcaggacagcaaggactctacctacagcctgagcagcaccctgacactgagcaaggccgactacgagaagcacaaagtgtacgcctgcgaagtgacccaccagggcctttctagccctgtgaccaagagcttcaaccggggcgagtgcgataagacccacacctgtcctccatgtccagctccagaactgctgggcggaccttccgtgttcctgtttcctccaaagcctaaggacaccctgatgatcagcagaacccctgaagtgacctgcgtggtggtggatgtgtctcacgaggaccctgaagtgaagttcaattggtacgtggacggcgtggaagtgcacaacgccaagaccaagcctagagaggaacagtacaacagcacctacagagtggtgtccgtgctgaccgtgctgcaccaggattggctgaacggcaaagagtacaagtgcaaggtgtccaacaaggccctgcctgcccctgaggaaaagaccatcagcaaggccaagggccagcctagggaaccccaggtttacacactgcctccaagccgcgaggaaatgaccaagaaccaggtgtccctgacctgcctcgtgaagggcttctacccttccgatatcgccgtggaatgggagagcaatggccagcctgagaacaactacaagacaacccctcctgtgctggacagcgacggctcattcttcctgtacagcaagctgaccgtggacaagtccagatggcagcagggcaacgtgttcagctgtagcgtgctgcacgaagccctgcacagccactacacccagaaaagcctgtctctgagccccggcaaatgataa

SEQ ID NO: 320 - RNA, 1488 nt, synthetic construct
  source 1..1488: mol_type = other RNA
atggattggatctggcgcatcctgtttctcgtgggagctgccacaggcgcccactctcaagttcacctgacacagtctggccccgaagtgcggaagcctggcacaagcgtgaaggtgtcctgtaaagcccctggcaacaccctgaaaacctacgacctgcactgggtccgatctgtgcctggacaaggactgcagtggatgggctggattagccacgagggcgacaagaaagtgatcgtggaacggttcaaggccaaagtgaccatcgactgggacagaagcaccaacaccgcctacctgcagctgagcggactgacatctggcgataccgccgtgtactactgtgccaagggcagcaagcaccggctgagagattacgccctgtacgacgatgacggcgccctgaattgggccgtcgatgtggactacctgagcaacctggaattctggggccagggaacagccgtgacagtgtctagtgcatctgtggccgctcctagcgtgttcatcttcccacctagcgacgaggaactgaagtctggcacagccagcgtcgtgtgcctgctgaacaacttctaccccagagaagccaaggtgcagtggaaggtggacaacgccctgcagagcggcaatagccaagagagcgtgaccgagcaggacagcaaggactctacctacagcctgagcagcaccctgacactgagcaaggccgactacgagaagcacaaagtgtacgcctgcgaagtgacccaccagggcctttctagccctgtgaccaagagcttcaaccggggcgagtgcgataagacccacacctgtcctccatgtccagctccagaactgctcggcggaccttccgtgttcctgtttcctccaaagcctaaggacaccctgatgatcagcagaacccctgaagtgacctgcgtggtggtggatgtgtctcacgaggaccccgaagtgaagttcaattggtacgtggacggcgtggaagtgcacaacgccaagaccaagcctagagaggaacagtacaacagcacctacagagtggtgtccgtgctgacagtgctgcaccaggattggctgaacggcaaagagtacaagtgcaaggtgtccaacaaggccctgcctgctcctatcgagaaaaccatcagcaaggccaagggccagcctagggaaccccaagtctgtacactgcctcctagccgcgaggaaatgaccaagaaccaggtgtccctgagctgcgccgtgaagggcttttacccttccgatatcgccgtggaatgggagagcaatggccagcctgagaacaactacaagacaacccctcctgtgctggacagcgacggctcattcttcctggtgtccaagctgacagtggacaagagcagatggcagcagggcaacgtgttcagctgctctgtgctgcacgaagccctgcacagccactacacccagaagtccctgtctctgagccccggcaagtgataa

SEQ ID NO: 321 - RNA, 1488 nt, synthetic construct
  source 1..1488: mol_type = other RNA
atggattggatctggcgcatcctgtttctcgtgggagctgccacaggcgcccactctcaagttcacctgacacagtctggccccgaagtgcggaagcctggcacaagcgtgaaggtgtcctgtaaagcccctggcaacaccctgaaaacctacgacctgcactgggtccgatctgtgcctggacaaggactgcagtggatgggctggattagccacgagggcgacaagaaagtgatcgtggaacggttcaaggccaaagtgaccatcgactgggacagaagcaccaacaccgcctacctgcagctgagcggactgacatctggcgataccgccgtgtactactgtgccaagggcagcaagcaccggctgagagattacgccctgtacgacgatgacggcgccctgaattgggccgtcgatgtggactacctgagcaacctggaattctggggccagggaacagccgtgacagtgtctagtgcatctgtggccgctcctagcgtgttcatcttcccacctagcgacgaggaactgaagtctggcacagccagcgtcgtgtgcctgctgaacaacttctaccccagagaagccaaggtgcagtggaaggtggacaacgccctgcagagcggcaatagccaagagagcgtgaccgagcaggacagcaaggactctacctacagcctgagcagcaccctgacactgagcaaggccgactacgagaagcacaaagtgtacgcctgcgaagtgacccaccagggcctttctagccctgtgaccaagagcttcaaccggggcgagtgcgataagacccacacctgtcctccatgtccagctccagaactgctggccggaccttccgtgttcctgtttcctccaaagcctaaggacaccctgatgatcagcagaacccctgaagtgacctgcgtggtggtggatgtgtctcacgaggaccccgaagtgaagttcaattggtacgtggacggcgtggaagtgcacaatgccaagaccaagcctagagaggaacagtacaacagcacctacagagtggtgtccgtgctgaccgtgctgcaccaggattggctgaacggcaaagagtacaagtgcaaggtgtccaacaaggccctgcctctgcctgaggaaaagaccatcagcaaggccaagggccagcctagggaaccccaagtctgtacactgcctcctagccgcgaggaaatgaccaagaaccaggtgtccctgagctgcgccgtgaagggcttttacccttccgatatcgccgtggaatgggagagcaatggccagcctgagaacaactacaagacaacccctcctgtgctggacagcgacggctcattcttcctggtgtccaagctgacagtggacaagagcagatggcagcagggcaacgtgttcagctgctctgtgctgcacgaagccctgcacagccactacacccagaagtccctgtctctgagccccggcaagtgataa

SEQ ID NO: 322 - RNA, 1488 nt, synthetic construct
  source 1..1488: mol_type = other RNA
atggattggatctggcgcatcctgtttctcgtgggagctgccacaggcgcccactctcaagttcacctgacacagtctggccccgaagtgcggaagcctggcacaagcgtgaaggtgtcctgtaaagcccctggcaacaccctgaaaacctacgacctgcactgggtccgatctgtgcctggacaaggactgcagtggatgggctggattagccacgagggcgacaagaaagtgatcgtggaacggttcaaggccaaagtgaccatcgactgggacagaagcaccaacaccgcctacctgcagctgagcggactgacatctggcgataccgccgtgtactactgtgccaagggcagcaagcaccggctgagagattacgccctgtacgacgatgacggcgccctgaattgggccgtcgatgtggactacctgagcaacctggaattctggggccagggaacagccgtgacagtgtctagtgcatctgtggccgctcctagcgtgttcatcttcccacctagcgacgaggaactgaagtctggcacagccagcgtcgtgtgcctgctgaacaacttctaccccagagaagccaaggtgcagtggaaggtggacaacgccctgcagagcggcaatagccaagagagcgtgaccgagcaggacagcaaggactctacctacagcctgagcagcaccctgacactgagcaaggccgactacgagaagcacaaagtgtacgcctgcgaagtgacccaccagggcctttctagccctgtgaccaagagcttcaaccggggcgagtgcgataagacccacacctgtcctccatgtccagctccagaactgctggccggaccttccgtgttcctgtttcctccaaagcctaaggacaccctgatgatcagcagaacccctgaagtgacctgcgtggtggtggatgtgtctcacgaggaccctgaagtgaagttcaattggtacgtggacggcgtggaagtgcacaacgccaagaccaagcctagagaggaacagtacaacagcacctacagagtggtgtccgtgctgaccgtgctgcaccaggattggctgaacggcaaagagtacaagtgcaaggtgtccaacaaggccctgcctgcccctgaggaaaagaccatcagcaaggccaagggccagcctagggaaccccaagtctgtacactgcctcctagccgcgaggaaatgaccaagaaccaggtgtccctgagctgcgccgtgaagggcttttacccttccgatatcgccgtggaatgggagagcaatggccagcctgagaacaactacaagacaacccctcctgtgctggacagcgacggctcattcttcctggtgtccaagctgacagtggacaagagcagatggcagcagggcaacgtgttcagctgctctgtgctgcacgaagccctgcacagccactacacccagaagtccctgtctctgagccccggcaagtgataa

SEQ ID NO: 323 - RNA, 1488 nt, synthetic construct
  source 1..1488: mol_type = other RNA
atggattggatctggcgcatcctgtttctcgtgggagctgccacaggcgcccactctcaagttcacctgacacagtctggccccgaagtgcggaagcctggcacaagcgtgaaggtgtcctgtaaagcccctggcaacaccctgaaaacctacgacctgcactgggtccgatctgtgcctggacaaggactgcagtggatgggctggattagccacgagggcgacaagaaagtgatcgtggaacggttcaaggccaaagtgaccatcgactgggacagaagcaccaacaccgcctacctgcagctgagcggactgacatctggcgataccgccgtgtactactgtgccaagggcagcaagcaccggctgagagattacgccctgtacgacgatgacggcgccctgaattgggccgtcgatgtggactacctgagcaacctggaattctggggccagggaacagccgtgacagtgtctagtgcatctgtggccgctcctagcgtgttcatcttcccacctagcgacgaggaactgaagtctggcacagccagcgtcgtgtgcctgctgaacaacttctaccccagagaagccaaggtgcagtggaaggtggacaacgccctgcagagcggcaatagccaagagagcgtgaccgagcaggacagcaaggactctacctacagcctgagcagcaccctgacactgagcaaggccgactacgagaagcacaaagtgtacgcctgcgaagtgacccaccagggcctttctagccctgtgaccaagagcttcaaccggggcgagtgcgataagacccacacctgtcctccatgtccagctccagaactgctggccggaccttccgtgttcctgtttcctccaaagcctaaggacaccctgatgatcagcagaacccctgaagtgacctgcgtggtggtggatgtgtctcacgaggaccctgaagtgaagttcaattggtacgtggacggcgtggaagtgcacaacgccaagaccaagcctagagaggaacagtacaacagcacctacagagtggtgtccgtgctgaccgtgctgcaccaggattggctgaacggcaaagagtacaagtgcaaggtgtccaacaaggccctgcctgcccctatcgaaaagaccatcagcaaggccaagggccagcctagggaaccccaagtctgtacactgcctcctagccgcgaggaaatgaccaagaaccaggtgtccctgagctgcgccgtgaagggcttttacccttccgatatcgccgtggaatgggagagcaatggccagcctgagaacaactacaagacaacccctcctgtgctggacagcgacggctcattcttcctggtgtccaagctgacagtggacaagagcagatggcagcagggcaacgtgttcagctgctctgtgctgcacgaagccctgcacagccactacacccagaagtccctgtctctgagccccggcaagtgataa

SEQ ID NO: 324 - RNA, 1488 nt, synthetic construct
  source 1..1488: mol_type = other RNA
atggattggatctggcgcatcctgtttctcgtgggagctgccacaggcgcccactctcaagttcacctgacacagtctggccccgaagtgcggaagcctggcacaagcgtgaaggtgtcctgtaaagcccctggcaacaccctgaaaacctacgacctgcactgggtccgatctgtgcctggacaaggactgcagtggatgggctggattagccacgagggcgacaagaaagtgatcgtggaacggttcaaggccaaagtgaccatcgactgggacagaagcaccaacaccgcctacctgcagctgagcggactgacatctggcgataccgccgtgtactactgtgccaagggcagcaagcaccggctgagagattacgccctgtacgacgatgacggcgccctgaattgggccgtcgatgtggactacctgagcaacctggaattctggggccagggaacagccgtgacagtgtctagtgcatctgtggccgctcctagcgtgttcatcttcccacctagcgacgaggaactgaagtctggcacagccagcgtcgtgtgcctgctgaacaacttctaccccagagaagccaaggtgcagtggaaggtggacaacgccctgcagagcggcaatagccaagagagcgtgaccgagcaggacagcaaggactctacctacagcctgagcagcaccctgacactgagcaaggccgactacgagaagcacaaagtgtacgcctgcgaagtgacccaccagggcctttctagccctgtgaccaagagcttcaaccggggcgagtgcgataagacccacacctgtcctccatgtccagctccagaactgctgggcggaccttccgtgttcctgtttcctccaaagcctaaggacaccctgatgatcagcagaacccctgaagtgacctgcgtggtggtggatgtgtctcacgaggaccctgaagtgaagttcaattggtacgtggacggcgtggaagtgcacaacgccaagaccaagcctagagaggaacagtacaacagcacctacagagtggtgtccgtgctgaccgtgctgcaccaggattggctgaacggcaaagagtacaagtgcaaggtgtccaacaaggccctgcctgcccctgaggaaaagaccatcagcaaggccaagggccagcctagggaaccccaagtctgtacactgcctcctagccgcgaggaaatgaccaagaaccaggtgtccctgagctgcgccgtgaagggcttttacccttccgatatcgccgtggaatgggagagcaatggccagcctgagaacaactacaagacaacccctcctgtgctggacagcgacggctcattcttcctggtgtccaagctgacagtggacaagagcagatggcagcagggcaacgtgttcagctgctctgtgctgcacgaagccctgcacagccactacacccagaagtccctgtctctgagccccggcaagtgataa

SEQ ID NO: 325 - RNA, 1488 nt, synthetic construct
  source 1..1488: mol_type = other RNA
atggattggatctggcgcatcctgtttctcgtgggagctgccacaggcgcccactctcaagttcacctgacacagtctggccccgaagtgcggaagcctggcacaagcgtgaaggtgtcctgtaaagcccctggcaacaccctgaaaacctacgacctgcactgggtccgatctgtgcctggacaaggactgcagtggatgggctggattagccacgagggcgacaagaaagtgatcgtggaacggttcaaggccaaagtgaccatcgactgggacagaagcaccaacaccgcctacctgcagctgagcggactgacatctggcgataccgccgtgtactactgtgccaagggcagcaagcaccggctgagagattacgccctgtacgacgatgacggcgccctgaattgggccgtcgatgtggactacctgagcaacctggaattctggggccagggaacagccgtgacagtgtctagtgcatctgtggccgctcctagcgtgttcatcttcccacctagcgacgaggaactgaagtctggcacagccagcgtcgtgtgcctgctgaacaacttctaccccagagaagccaaggtgcagtggaaggtggacaacgccctgcagagcggcaatagccaagagagcgtgaccgagcaggacagcaaggactctacctacagcctgagcagcaccctgacactgagcaaggccgactacgagaagcacaaagtgtacgcctgcgaagtgacccaccagggcctttctagccctgtgaccaagagcttcaaccggggcgagtgcgataagacccacacctgtcctccatgtccagctccagaactgctcggcggaccttccgtgttcctgtttcctccaaagcctaaggacaccctgatgatcagcagaacccctgaagtgacctgcgtggtggtggatgtgtctcacgaggaccccgaagtgaagttcaattggtacgtggacggcgtggaagtgcacaacgccaagaccaagcctagagaggaacagtacaacagcacctacagagtggtgtccgtgctgacagtgctgcaccaggattggctgaacggcaaagagtacaagtgcaaggtgtccaacaaggccctgcctgctcctatcgagaaaaccatcagcaaggccaagggccagcctagggaaccccaggtttacaccctgcctccatgccgcgaggaaatgaccaagaaccaggtgtccctgtggtgcctcgtgaagggcttctacccttccgatatcgccgtggaatgggagagcaatggccagcctgagaacaactacaagacaacccctcctgtgctggacagcgacggctcattcttcctgtacagcaagctgaccgtggacaagtccagatggcagcagggcaacgtgttcagctgtagcgtgctgcacgaagccctgcacagccactacacccagaagtccctgtctctgagccccggcaagtgataa

SEQ ID NO: 326 - RNA, 1488 nt, synthetic construct
  source 1..1488: mol_type = other RNA
atggattggatctggcgcatcctgtttctcgtgggagctgccacaggcgcccactctcaagttcacctgacacagtctggccccgaagtgcggaagcctggcacaagcgtgaaggtgtcctgtaaagcccctggcaacaccctgaaaacctacgacctgcactgggtccgatctgtgcctggacaaggactgcagtggatgggctggattagccacgagggcgacaagaaagtgatcgtggaacggttcaaggccaaagtgaccatcgactgggacagaagcaccaacaccgcctacctgcagctgagcggactgacatctggcgataccgccgtgtactactgtgccaagggcagcaagcaccggctgagagattacgccctgtacgacgatgacggcgccctgaattgggccgtcgatgtggactacctgagcaacctggaattctggggccagggaacagccgtgacagtgtctagtgcatctgtggccgctcctagcgtgttcatcttcccacctagcgacgaggaactgaagtctggcacagccagcgtcgtgtgcctgctgaacaacttctaccccagagaagccaaggtgcagtggaaggtggacaacgccctgcagagcggcaatagccaagagagcgtgaccgagcaggacagcaaggactctacctacagcctgagcagcaccctgacactgagcaaggccgactacgagaagcacaaagtgtacgcctgcgaagtgacccaccagggcctttctagccctgtgaccaagagcttcaaccggggcgagtgcgataagacccacacctgtcctccatgtccagctccagaactgctggccggaccttccgtgttcctgtttcctccaaagcctaaggacaccctgatgatcagcagaacccctgaagtgacctgcgtggtggtggatgtgtctcacgaggaccccgaagtgaagttcaattggtacgtggacggcgtggaagtgcacaatgccaagaccaagcctagagaggaacagtacaacagcacctacagagtggtgtccgtgctgaccgtgctgcaccaggattggctgaacggcaaagagtacaagtgcaaggtgtccaacaaggccctgcctctgcctgaggaaaagaccatcagcaaggccaagggccagcctagggaaccccaggtttacaccctgcctccatgccgcgaggaaatgaccaagaaccaggtgtccctgtggtgcctcgtgaagggcttctacccttccgatatcgccgtggaatgggagagcaatggccagcctgagaacaactacaagacaacccctcctgtgctggacagcgacggctcattcttcctgtacagcaagctgaccgtggacaagtccagatggcagcagggcaacgtgttcagctgtagcgtgctgcacgaagccctgcacagccactacacccagaagtccctgtctctgagccccggcaagtgataa

SEQ ID NO: 327 - RNA, 1488 nt, synthetic construct
  source 1..1488: mol_type = other RNA
atggattggatctggcgcatcctgtttctcgtgggagctgccacaggcgcccactctcaagttcacctgacacagtctggccccgaagtgcggaagcctggcacaagcgtgaaggtgtcctgtaaagcccctggcaacaccctgaaaacctacgacctgcactgggtccgatctgtgcctggacaaggactgcagtggatgggctggattagccacgagggcgacaagaaagtgatcgtggaacggttcaaggccaaagtgaccatcgactgggacagaagcaccaacaccgcctacctgcagctgagcggactgacatctggcgataccgccgtgtactactgtgccaagggcagcaagcaccggctgagagattacgccctgtacgacgatgacggcgccctgaattgggccgtcgatgtggactacctgagcaacctggaattctggggccagggaacagccgtgacagtgtctagtgcatctgtggccgctcctagcgtgttcatcttcccacctagcgacgaggaactgaagtctggcacagccagcgtcgtgtgcctgctgaacaacttctaccccagagaagccaaggtgcagtggaaggtggacaacgccctgcagagcggcaatagccaagagagcgtgaccgagcaggacagcaaggactctacctacagcctgagcagcaccctgacactgagcaaggccgactacgagaagcacaaagtgtacgcctgcgaagtgacccaccagggcctttctagccctgtgaccaagagcttcaaccggggcgagtgcgataagacccacacctgtcctccatgtccagctccagaactgctggccggaccttccgtgttcctgtttcctccaaagcctaaggacaccctgatgatcagcagaacccctgaagtgacctgcgtggtggtggatgtgtctcacgaggaccctgaagtgaagttcaattggtacgtggacggcgtggaagtgcacaacgccaagaccaagcctagagaggaacagtacaacagcacctacagagtggtgtccgtgctgaccgtgctgcaccaggattggctgaacggcaaagagtacaagtgcaaggtgtccaacaaggccctgcctgcccctgaggaaaagaccatcagcaaggccaagggccagcctagggaaccccaggtttacaccctgcctccatgccgcgaggaaatgaccaagaaccaggtgtccctgtggtgcctcgtgaagggcttctacccttccgatatcgccgtggaatgggagagcaatggccagcctgagaacaactacaagacaacccctcctgtgctggacagcgacggctcattcttcctgtacagcaagctgaccgtggacaagtccagatggcagcagggcaacgtgttcagctgtagcgtgctgcacgaagccctgcacagccactacacccagaagtccctgtctctgagccccggcaagtgataa

SEQ ID NO: 328 - RNA, 1488 nt, synthetic construct
  source 1..1488: mol_type = other RNA
atggattggatctggcgcatcctgtttctcgtgggagctgccacaggcgcccactctcaagttcacctgacacagtctggccccgaagtgcggaagcctggcacaagcgtgaaggtgtcctgtaaagcccctggcaacaccctgaaaacctacgacctgcactgggtccgatctgtgcctggacaaggactgcagtggatgggctggattagccacgagggcgacaagaaagtgatcgtggaacggttcaaggccaaagtgaccatcgactgggacagaagcaccaacaccgcctacctgcagctgagcggactgacatctggcgataccgccgtgtactactgtgccaagggcagcaagcaccggctgagagattacgccctgtacgacgatgacggcgccctgaattgggccgtcgatgtggactacctgagcaacctggaattctggggccagggaacagccgtgacagtgtctagtgcatctgtggccgctcctagcgtgttcatcttcccacctagcgacgaggaactgaagtctggcacagccagcgtcgtgtgcctgctgaacaacttctaccccagagaagccaaggtgcagtggaaggtggacaacgccctgcagagcggcaatagccaagagagcgtgaccgagcaggacagcaaggactctacctacagcctgagcagcaccctgacactgagcaaggccgactacgagaagcacaaagtgtacgcctgcgaagtgacccaccagggcctttctagccctgtgaccaagagcttcaaccggggcgagtgcgataagacccacacctgtcctccatgtccagctccagaactgctggccggaccttccgtgttcctgtttcctccaaagcctaaggacaccctgatgatcagcagaacccctgaagtgacctgcgtggtggtggatgtgtctcacgaggaccctgaagtgaagttcaattggtacgtggacggcgtggaagtgcacaacgccaagaccaagcctagagaggaacagtacaacagcacctacagagtggtgtccgtgctgaccgtgctgcaccaggattggctgaacggcaaagagtacaagtgcaaggtgtccaacaaggccctgcctgcccctatcgaaaagaccatcagcaaggccaagggccagcctagggaaccccaggtttacaccctgcctccatgccgcgaggaaatgaccaagaaccaggtgtccctgtggtgcctcgtgaagggcttctacccttccgatatcgccgtggaatgggagagcaatggccagcctgagaacaactacaagacaacccctcctgtgctggacagcgacggctcattcttcctgtacagcaagctgaccgtggacaagtccagatggcagcagggcaacgtgttcagctgtagcgtgctgcacgaagccctgcacagccactacacccagaagtccctgtctctgagccccggcaagtgataa

SEQ ID NO: 329 - RNA, 1488 nt, synthetic construct
  source 1..1488: mol_type = other RNA
atggattggatctggcgcatcctgtttctcgtgggagctgccacaggcgcccactctcaagttcacctgacacagtctggccccgaagtgcggaagcctggcacaagcgtgaaggtgtcctgtaaagcccctggcaacaccctgaaaacctacgacctgcactgggtccgatctgtgcctggacaaggactgcagtggatgggctggattagccacgagggcgacaagaaagtgatcgtggaacggttcaaggccaaagtgaccatcgactgggacagaagcaccaacaccgcctacctgcagctgagcggactgacatctggcgataccgccgtgtactactgtgccaagggcagcaagcaccggctgagagattacgccctgtacgacgatgacggcgccctgaattgggccgtcgatgtggactacctgagcaacctggaattctggggccagggaacagccgtgacagtgtctagtgcatctgtggccgctcctagcgtgttcatcttcccacctagcgacgaggaactgaagtctggcacagccagcgtcgtgtgcctgctgaacaacttctaccccagagaagccaaggtgcagtggaaggtggacaacgccctgcagagcggcaatagccaagagagcgtgaccgagcaggacagcaaggactctacctacagcctgagcagcaccctgacactgagcaaggccgactacgagaagcacaaagtgtacgcctgcgaagtgacccaccagggcctttctagccctgtgaccaagagcttcaaccggggcgagtgcgataagacccacacctgtcctccatgtccagctccagaactgctgggcggaccttccgtgttcctgtttcctccaaagcctaaggacaccctgatgatcagcagaacccctgaagtgacctgcgtggtggtggatgtgtctcacgaggaccctgaagtgaagttcaattggtacgtggacggcgtggaagtgcacaacgccaagaccaagcctagagaggaacagtacaacagcacctacagagtggtgtccgtgctgaccgtgctgcaccaggattggctgaacggcaaagagtacaagtgcaaggtgtccaacaaggccctgcctgcccctgaggaaaagaccatcagcaaggccaagggccagcctagggaaccccaggtttacaccctgcctccatgccgcgaggaaatgaccaagaaccaggtgtccctgtggtgcctcgtgaagggcttctacccttccgatatcgccgtggaatgggagagcaatggccagcctgagaacaactacaagacaacccctcctgtgctggacagcgacggctcattcttcctgtacagcaagctgaccgtggacaagtccagatggcagcagggcaacgtgttcagctgtagcgtgctgcacgaagccctgcacagccactacacccagaagtccctgtctctgagccccggcaagtgataa

SEQ ID NO: 330 - RNA, 1488 nt, synthetic construct; identical to SEQ ID NO: 314
  source 1..1488: mol_type = other RNA

SEQ ID NO: 331 - RNA, 1488 nt, synthetic construct; identical to SEQ ID NO: 315
  source 1..1488: mol_type = other RNA

SEQ ID NO: 332 - RNA, 1488 nt, synthetic construct; identical to SEQ ID NO: 316
  source 1..1488: mol_type = other RNA

SEQ ID NO: 333 - RNA, 1488 nt, synthetic construct; identical to SEQ ID NO: 317
  source 1..1488: mol_type = other RNA

SEQ ID NO: 334 - RNA, 1488 nt, synthetic construct; identical to SEQ ID NO: 318
  source 1..1488: mol_type = other RNA

SEQ ID NO: 335 - RNA, 1488 nt, synthetic construct; identical to SEQ ID NO: 319
  source 1..1488: mol_type = other RNA

SEQ ID NO: 336 - RNA, 1488 nt, synthetic construct; identical to SEQ ID NO: 320
  source 1..1488: mol_type = other RNA

SEQ ID NO: 337 - RNA, 1488 nt, synthetic construct; identical to SEQ ID NO: 321
  source 1..1488: mol_type = other RNA

SEQ ID NO: 338 - RNA, 1488 nt, synthetic construct; identical to SEQ ID NO: 322
  source 1..1488: mol_type = other RNA

SEQ ID NO: 339 - RNA, 1488 nt, synthetic construct; identical to SEQ ID NO: 323
  source 1..1488: mol_type = other RNA

SEQ ID NO: 340 - RNA, 1488 nt, synthetic construct; identical to SEQ ID NO: 324
  source 1..1488: mol_type = other RNA

SEQ ID NO: 341 - RNA, 1488 nt, synthetic construct; identical to SEQ ID NO: 325
  source 1..1488: mol_type = other RNA

SEQ ID NO: 342 - RNA, 1488 nt, synthetic construct; identical to SEQ ID NO: 326
  source 1..1488: mol_type = other RNA

SEQ ID NO: 343 - RNA, 1488 nt, synthetic construct; identical to SEQ ID NO: 327
  source 1..1488: mol_type = other RNA

SEQ ID NO: 344 - RNA, 1488 nt, synthetic construct; identical to SEQ ID NO: 328
  source 1..1488: mol_type = other RNA

SEQ ID NO: 345 - RNA, 1488 nt, synthetic construct; identical to SEQ ID NO: 329
  source 1..1488: mol_type = other RNA

SEQ ID NO: 346 - RNA, 1488 nt, synthetic construct
  source 1..1488: mol_type = other RNA
atggattggatctggcgcatcctgtttctcgtgggagctgccacaggcgcccactctcaagttcacctgacacagtctggccccgaagtgcggaagcctggcacaagcgtgaaggtgtcctgtaaagcccctggcaacaccctgaaaacctacgacctgcactgggtccgatctgtgcctggacaaggactgcagtggatgggctggattagccacgagggcgacaagaaagtgatcgtggaacggttcaaggccaaagtgaccatcgactgggacagaagcaccaacaccgcctacctgcagctgagcggactgacatctggcgataccgccgtgtactactgtgccaagggcagcaagcaccggctgagagattacgccctgtacgacgatgacggcgccctgaattgggccgtcgatgtggactacctgagcaacctggaattctggggccagggaacagccgtgacagtgtctagtgcatctgtggccgctcctagcgtgttcatcttcccacctagcgacgaggaactgaagtctggcacagccagcgtcgtgtgcctgctgaacaacttctaccccagagaagccaaggtgcagtggaaggtggacaacgccctgcagagcggcaatagccaagagagcgtgaccgagcaggacagcaaggactctacctacagcctgagcagcaccctgacactgagcaaggccgactacgagaagcacaaagtgtacgcctgcgaagtgacccaccagggcctttctagccctgtgaccaagagcttcaaccggggcgagtgcgataagacccacacctgtcctccatgtccagctccagaactgctcggcggaccttccgtgttcctgtttcctccaaagcctaaggacaccctgatgatcagcagaacccctgaagtgacctgcgtggtggtggatgtgtctcacgaggaccccgaagtgaagttcaattggtacgtggacggcgtggaagtgcacaacgccaagaccaagcctagagaggaacagtacaacagcacctacagagtggtgtccgtgctgacagtgctgcaccaggattggctgaacggcaaagagtacaagtgcaaggtgtccaacaaggccctgcctgctcctatcgagaaaaccatcagcaaggccaagggccagcctagggaaccccaggtttacacactgcctccaagccgcgacgaactgaccaagaaccaggtgtccctgacctgcctcgtgaagggcttctacccttccgatatcgccgtggaatgggagagcaatggccagcctgagaacaactacaagacaacccctcctgtgctggacagcgacggctcattcttcctgtacagcaagctgactgtggataagtcccggtggcagcagggcaacgtgttcagctgttctgtgatgcacgaagccctgcacaaccactacacccagaaaagcctgtctctgagccccggcaagtgataa

SEQ ID NO: 347 - RNA, 1488 nt, synthetic construct
  source 1..1488: mol_type = other RNA
atggattggatctggcgcatcctgtttctcgtgggagctgccacaggcgcccactctcaagttcacctgacacagtctggccccgaagtgcggaagcctggcacaagcgtgaaggtgtcctgtaaagcccctggcaacaccctgaaaacctacgacctgcactgggtccgatctgtgcctggacaaggactgcagtggatgggctggattagccacgagggcgacaagaaagtgatcgtggaacggttcaaggccaaagtgaccatcgactgggacagaagcaccaacaccgcctacctgcagctgagcggactgacatctggcgataccgccgtgtactactgtgccaagggcagcaagcaccggctgagagattacgccctgtacgacgatgacggcgccctgaattgggccgtcgatgtggactacctgagcaacctggaattctggggccagggaacagccgtgacagtgtctagtgcatctgtggccgctcctagcgtgttcatcttcccacctagcgacgaggaactgaagtctggcacagccagcgtcgtgtgcctgctgaacaacttctaccccagagaagccaaggtgcagtggaaggtggacaacgccctgcagagcggcaatagccaagagagcgtgaccgagcaggacagcaaggactctacctacagcctgagcagcaccctgacactgagcaaggccgactacgagaagcacaaagtgtacgcctgcgaagtgacccaccagggcctttctagccctgtgaccaagagcttcaaccggggcgagtgcgataagacccacacctgtcctccatgtccagctccagaactgctcggcggaccttccgtgttcctgtttcctccaaagcctaaggacaccctgatgatcagcagaacccctgaagtgacctgcgtggtggtggatgtgtctcacgaggaccccgaagtgaagttcaattggtacgtggacggcgtggaagtgcacaacgccaagaccaagcctagagaggaacagtacaacagcacctacagagtggtgtccgtgctgacagtgctgcaccaggattggctgaacggcaaagagtacaagtgcaaggtgtccaacaaggccctgcctgctcctatcgagaaaaccatcagcaaggccaagggccagcctagggaaccccaggtttacacactgcctccaagccgcgacgaactgaccaagaaccaggtgtccctgacctgcctcgtgaagggcttctacccttccgatatcgccgtggaatgggagagcaatggccagcctgagaacaactacaagacaacccctcctgtgctggacagcgacggctcattcttcctgtacagcaagctgaccgtggacaagtccagatggcagcagggcaacgtgttcagctgtagcgtgctgcacgaagccctgcacagccactacacccagaaaagcctgtctctgagccccggcaaatgataa

SEQ ID NO: 348 - RNA, 1488 nt, synthetic construct
  source 1..1488: mol_type = other RNA
atggattggatctggcgcatcctgtttctcgtgggagctgccacaggcgcccactctcaagttcacctgacacagtctggccccgaagtgcggaagcctggcacaagcgtgaaggtgtcctgtaaagcccctggcaacaccctgaaaacctacgacctgcactgggtccgatctgtgcctggacaaggactgcagtggatgggctggattagccacgagggcgacaagaaagtgatcgtggaacggttcaaggccaaagtgaccatcgactgggacagaagcaccaacaccgcctacctgcagctgagcggactgacatctggcgataccgccgtgtactactgtgccaagggcagcaagcaccggctgagagattacgccctgtacgacgatgacggcgccctgaattgggccgtcgatgtggactacctgagcaacctggaattctggggccagggaacagccgtgacagtgtctagtgcatctgtggccgctcctagcgtgttcatcttcccacctagcgacgaggaactgaagtctggcacagccagcgtcgtgtgcctgctgaacaacttctaccccagagaagccaaggtgcagtggaaggtggacaacgccctgcagagcggcaatagccaagagagcgtgaccgagcaggacagcaaggactctacctacagcctgagcagcaccctgacactgagcaaggccgactacgagaagcacaaagtgtacgcctgcgaagtgacccaccagggcctttctagccctgtgaccaagagcttcaaccggggcgagtgcgataagacccacacctgtcctccatgtccagctccagaactgctggccggaccttccgtgttcctgtttcctccaaagcctaaggacaccctgatgatcagcagaacccctgaagtgacctgcgtggtggtggatgtgtctcacgaggaccccgaagtgaagttcaattggtacgtggacggcgtggaagtgcacaatgccaagaccaagcctagagaggaacagtacaacagcacctacagagtggtgtccgtgctgaccgtgctgcaccaggattggctgaacggcaaagagtacaagtgcaaggtgtccaacaaggccctgcctctgcctgaggaaaagaccatcagcaaggccaagggccagcctagggaaccccaggtttacacactgcctccaagccgcgacgaactgaccaagaaccaggtgtccctgacctgcctcgtgaagggcttctacccttccgatatcgccgtggaatgggagagcaatggccagcctgagaacaactacaagacaacccctcctgtgctggacagcgacggctcattcttcctgtacagcaagctgaccgtggacaagtccagatggcagcagggcaacgtgttcagctgtagcgtgctgcacgaagccctgcacagccactacacccagaaaagcctgtctctgagccccggcaaatgataa

SEQ ID NO: 349 - RNA, 1488 nt, synthetic construct
  source 1..1488: mol_type = other RNA
atggattggatctggcgcatcctgtttctcgtgggagctgccacaggcgcccactctcaagttcacctgacacagtctggccccgaagtgcggaagcctggcacaagcgtgaaggtgtcctgtaaagcccctggcaacaccctgaaaacctacgacctgcactgggtccgatctgtgcctggacaaggactgcagtggatgggctggattagccacgagggcgacaagaaagtgatcgtggaacggttcaaggccaaagtgaccatcgactgggacagaagcaccaacaccgcctacctgcagctgagcggactgacatctggcgataccgccgtgtactactgtgccaagggcagcaagcaccggctgagagattacgccctgtacgacgatgacggcgccctgaattgggccgtcgatgtggactacctgagcaacctggaattctggggccagggaacagccgtgacagtgtctagtgcatctgtggccgctcctagcgtgttcatcttcccacctagcgacgaggaactgaagtctggcacagccagcgtcgtgtgcctgctgaacaacttctaccccagagaagccaaggtgcagtggaaggtggacaacgccctgcagagcggcaatagccaagagagcgtgaccgagcaggacagcaaggactctacctacagcctgagcagcaccctgacactgagcaaggccgactacgagaagcacaaagtgtacgcctgcgaagtgacccaccagggcctttctagccctgtgaccaagagcttcaaccggggcgagtgcgataagacccacacctgtcctccatgtccagctccagaactgctggccggaccttccgtgttcctgtttcctccaaagcctaaggacaccctgatgatcagcagaacccctgaagtgacctgcgtggtggtggatgtgtctcacgaggaccctgaagtgaagttcaattggtacgtggacggcgtggaagtgcacaacgccaagaccaagcctagagaggaacagtacaacagcacctacagagtggtgtccgtgctgaccgtgctgcaccaggattggctgaacggcaaagagtacaagtgcaaggtgtccaacaaggccctgcctgcccctgaggaaaagaccatcagcaaggccaagggccagcctagggaaccccaggtttacacactgcctccaagccgcgacgaactgaccaagaaccaggtgtccctgacctgcctcgtgaagggcttctacccttccgatatcgccgtggaatgggagagcaatggccagcctgagaacaactacaagacaacccctcctgtgctggacagcgacggctcattcttcctgtacagcaagctgaccgtggacaagtccagatggcagcagggcaacgtgttcagctgtagcgtgctgcacgaagccctgcacagccactacacccagaaaagcctgtctctgagccccggcaaatgataa

SEQ ID NO: 350 - RNA, 1488 nt, synthetic construct
  source 1..1488: mol_type = other RNA
atggattggatctggcgcatcctgtttctcgtgggagctgccacaggcgcccactctcaagttcacctgacacagtctggccccgaagtgcggaagcctggcacaagcgtgaaggtgtcctgtaaagcccctggcaacaccctgaaaacctacgacctgcactgggtccgatctgtgcctggacaaggactgcagtggatgggctggattagccacgagggcgacaagaaagtgatcgtggaacggttcaaggccaaagtgaccatcgactgggacagaagcaccaacaccgcctacctgcagctgagcggactgacatctggcgataccgccgtgtactactgtgccaagggcagcaagcaccggctgagagattacgccctgtacgacgatgacggcgccctgaattgggccgtcgatgtggactacctgagcaacctggaattctggggccagggaacagccgtgacagtgtctagtgcatctgtggccgctcctagcgtgttcatcttcccacctagcgacgaggaactgaagtctggcacagccagcgtcgtgtgcctgctgaacaacttctaccccagagaagccaaggtgcagtggaaggtggacaacgccctgcagagcggcaatagccaagagagcgtgaccgagcaggacagcaaggactctacctacagcctgagcagcaccctgacactgagcaaggccgactacgagaagcacaaagtgtacgcctgcgaagtgacccaccagggcctttctagccctgtgaccaagagcttcaaccggggcgagtgcgataagacccacacctgtcctccatgtccagctccagaactgctggccggaccttccgtgttcctgtttcctccaaagcctaaggacaccctgatgatcagcagaacccctgaagtgacctgcgtggtggtggatgtgtctcacgaggaccctgaagtgaagttcaattggtacgtggacggcgtggaagtgcacaacgccaagaccaagcctagagaggaacagtacaacagcacctacagagtggtgtccgtgctgaccgtgctgcaccaggattggctgaacggcaaagagtacaagtgcaaggtgtccaacaaggccctgcctgcccctatcgaaaagaccatcagcaaggccaagggccagcctagggaaccccaggtttacacactgcctccaagccgcgacgaactgaccaagaaccaggtgtccctgacctgcctcgtgaagggcttctacccttccgatatcgccgtggaatgggagagcaatggccagcctgagaacaactacaagacaacccctcctgtgctggacagcgacggctcattcttcctgtacagcaagctgaccgtggacaagtccagatggcagcagggcaacgtgttcagctgtagcgtgctgcacgaagccctgcacagccactacacccagaaaagcctgtctctgagccccggcaaatgataa

SEQ ID NO: 351 - RNA, 1488 nt, synthetic construct
  source 1..1488: mol_type = other RNA
atggattggatctggcgcatcctgtttctcgtgggagctgccacaggcgcccactctcaagttcacctgacacagtctggccccgaagtgcggaagcctggcacaagcgtgaaggtgtcctgtaaagcccctggcaacaccctgaaaacctacgacctgcactgggtccgatctgtgcctggacaaggactgcagtggatgggctggattagccacgagggcgacaagaaagtgatcgtggaacggttcaaggccaaagtgaccatcgactgggacagaagcaccaacaccgcctacctgcagctgagcggactgacatctggcgataccgccgtgtactactgtgccaagggcagcaagcaccggctgagagattacgccctgtacgacgatgacggcgccctgaattgggccgtcgatgtggactacctgagcaacctggaattctggggccagggaacagccgtgacagtgtctagtgcatctgtggccgctcctagcgtgttcatcttcccacctagcgacgaggaactgaagtctggcacagccagcgtcgtgtgcctgctgaacaacttctaccccagagaagccaaggtgcagtggaaggtggacaacgccctgcagagcggcaatagccaagagagcgtgaccgagcaggacagcaaggactctacctacagcctgagcagcaccctgacactgagcaaggccgactacgagaagcacaaagtgtacgcctgcgaagtgacccaccagggcctttctagccctgtgaccaagagcttcaaccggggcgagtgcgataagacccacacctgtcctccatgtccagctccagaactgctgggcggaccttccgtgttcctgtttcctccaaagcctaaggacaccctgatgatcagcagaacccctgaagtgacctgcgtggtggtggatgtgtctcacgaggaccctgaagtgaagttcaattggtacgtggacggcgtggaagtgcacaacgccaagaccaagcctagagaggaacagtacaacagcacctacagagtggtgtccgtgctgaccgtgctgcaccaggattggctgaacggcaaagagtacaagtgcaaggtgtccaacaaggccctgcctgcccctgaggaaaagaccatcagcaaggccaagggccagcctagggaaccccaggtttacacactgcctccaagccgcgacgaactgaccaagaaccaggtgtccctgacctgcctcgtgaagggcttctacccttccgatatcgccgtggaatgggagagcaatggccagcctgagaacaactacaagacaacccctcctgtgctggacagcgacggctcattcttcctgtacagcaagctgaccgtggacaagtccagatggcagcagggcaacgtgttcagctgtagcgtgctgcacgaagccctgcacagccactacacccagaaaagcctgtctctgagccccggcaaatgataa

SEQ ID NO: 352 - RNA, 1488 nt, synthetic construct
  source 1..1488: mol_type = other RNA
atggattggatctggcgcatcctgtttctcgtgggagctgccacaggcgcccactctcaagttcacctgacacagtctggccccgaagtgcggaagcctggcacaagcgtgaaggtgtcctgtaaagcccctggcaacaccctgaaaacctacgacctgcactgggtccgatctgtgcctggacaaggactgcagtggatgggctggattagccacgagggcgacaagaaagtgatcgtggaacggttcaaggccaaagtgaccatcgactgggacagaagcaccaacaccgcctacctgcagctgagcggactgacatctggcgataccgccgtgtactactgtgccaagggcagcaagcaccggctgagagattacgccctgtacgacgatgacggcgccctgaattgggccgtcgatgtggactacctgagcaacctggaattctggggccagggaacagccgtgacagtgtctagtgcatctgtggccgctcctagcgtgttcatcttcccacctagcgacgaggaactgaagtctggcacagccagcgtcgtgtgcctgctgaacaacttctaccccagagaagccaaggtgcagtggaaggtggacaacgccctgcagagcggcaatagccaagagagcgtgaccgagcaggacagcaaggactctacctacagcctgagcagcaccctgacactgagcaaggccgactacgagaagcacaaagtgtacgcctgcgaagtgacccaccagggcctttctagccctgtgaccaagagcttcaaccggggcgagtgcgataagacccacacctgtcctccatgtccagctccagaactgctcggcggaccttccgtgttcctgtttcctccaaagcctaaggacaccctgatgatcagcagaacccctgaagtgacctgcgtggtggtggatgtgtctcacgaggaccccgaagtgaagttcaattggtacgtggacggcgtggaagtgcacaacgccaagaccaagcctagagaggaacagtacaacagcacctacagagtggtgtccgtgctgacagtgctgcaccaggattggctgaacggcaaagagtacaagtgcaaggtgtccaacaaggccctgcctgctcctatcgagaaaaccatcagcaaggccaagggccagcctcgcgaacctcaagtctgtacactgcctcctagccgcgacgaactgaccaagaaccaggtgtccctgagctgcgccgtgaagggcttttacccttccgatatcgccgtggaatgggagagcaatggccagcctgagaacaactacaagacaacccctcctgtgctggacagcgacggctcattcttcctggtgtccaagctgacagtggacaagagcagatggcagcagggcaacgtgttcagctgcagcgtgctgcatgaagccctgcacagccactacacccagaagtccctgtctctgagccccggcaagtgataa

SEQ ID NO: 353 - RNA, 1488 nt, synthetic construct
  source 1..1488: mol_type = other RNA
atggattggatctggcgcatcctgtttctcgtgggagctgccacaggcgcccactctcaagttcacctgacacagtctggccccgaagtgcggaagcctggcacaagcgtgaaggtgtcctgtaaagcccctggcaacaccctgaaaacctacgacctgcactgggtccgatctgtgcctggacaaggactgcagtggatgggctggattagccacgagggcgacaagaaagtgatcgtggaacggttcaaggccaaagtgaccatcgactgggacagaagcaccaacaccgcctacctgcagctgagcggactgacatctggcgataccgccgtgtactactgtgccaagggcagcaagcaccggctgagagattacgccctgtacgacgatgacggcgccctgaattgggccgtcgatgtggactacctgagcaacctggaattctggggccagggaacagccgtgacagtgtctagtgcatctgtggccgctcctagcgtgttcatcttcccacctagcgacgaggaactgaagtctggcacagccagcgtcgtgtgcctgctgaacaacttctaccccagagaagccaaggtgcagtggaaggtggacaacgccctgcagagcggcaatagccaagagagcgtgaccgagcaggacagcaaggactctacctacagcctgagcagcaccctgacactgagcaaggccgactacgagaagcacaaagtgtacgcctgcgaagtgacccaccagggcctttctagccctgtgaccaagagcttcaaccggggcgagtgcgataagacccacacctgtcctccatgtccagctccagaactgctggccggaccttccgtgttcctgtttcctccaaagcctaaggacaccctgatgatcagcagaacccctgaagtgacctgcgtggtggtggatgtgtctcacgaggaccccgaagtgaagttcaattggtacgtggacggcgtggaagtgcacaatgccaagaccaagcctagagaggaacagtacaacagcacctacagagtggtgtccgtgctgaccgtgctgcaccaggattggctgaacggcaaagagtacaagtgcaaggtgtccaacaaggccctgcctctgcctgaggaaaagaccatcagcaaggccaagggccagcctcgcgaacctcaagtctgtacactgcctcctagccgcgacgaactgaccaagaaccaggtgtccctgagctgcgccgtgaagggcttttacccttccgatatcgccgtggaatgggagagcaatggccagcctgagaacaactacaagacaacccctcctgtgctggacagcgacggctcattcttcctggtgtccaagctgacagtggacaagagcagatggcagcagggcaacgtgttcagctgcagcgtgctgcatgaagccctgcacagccactacacccagaagtccctgtctctgagccccggcaagtgataa

SEQ ID NO: 354 - RNA, 1488 nt, synthetic construct
  source 1..1488: mol_type = other RNA
atggattggatctggcgcatcctgtttctcgtgggagctgccacaggcgcccactctcaagttcacctgacacagtctggccccgaagtgcggaagcctggcacaagcgtgaaggtgtcctgtaaagcccctggcaacaccctgaaaacctacgacctgcactgggtccgatctgtgcctggacaaggactgcagtggatgggctggattagccacgagggcgacaagaaagtgatcgtggaacggttcaaggccaaagtgaccatcgactgggacagaagcaccaacaccgcctacctgcagctgagcggactgacatctggcgataccgccgtgtactactgtgccaagggcagcaagcaccggctgagagattacgccctgtacgacgatgacggcgccctgaattgggccgtcgatgtggactacctgagcaacctggaattctggggccagggaacagccgtgacagtgtctagtgcatctgtggccgctcctagcgtgttcatcttcccacctagcgacgaggaactgaagtctggcacagccagcgtcgtgtgcctgctgaacaacttctaccccagagaagccaaggtgcagtggaaggtggacaacgccctgcagagcggcaatagccaagagagcgtgaccgagcaggacagcaaggactctacctacagcctgagcagcaccctgacactgagcaaggccgactacgagaagcacaaagtgtacgcctgcgaagtgacccaccagggcctttctagccctgtgaccaagagcttcaaccggggcgagtgcgataagacccacacctgtcctccatgtccagctccagaactgctggccggaccttccgtgttcctgtttcctccaaagcctaaggacaccctgatgatcagcagaacccctgaagtgacctgcgtggtggtggatgtgtctcacgaggaccctgaagtgaagttcaattggtacgtggacggcgtggaagtgcacaacgccaagaccaagcctagagaggaacagtacaacagcacctacagagtggtgtccgtgctgaccgtgctgcaccaggattggctgaacggcaaagagtacaagtgcaaggtgtccaacaaggccctgcctgcccctgaggaaaagaccatcagcaaggccaagggccagcctcgcgaacctcaagtctgtacactgcctcctagccgcgacgaactgaccaagaaccaggtgtccctgagctgcgccgtgaagggcttttacccttccgatatcgccgtggaatgggagagcaatggccagcctgagaacaactacaagacaacccctcctgtgctggacagcgacggctcattcttcctggtgtccaagctgacagtggacaagagcagatggcagcagggcaacgtgttcagctgcagcgtgctgcatgaagccctgcacagccactacacccagaagtccctgtctctgagccccggcaagtgataa

SEQ ID NO: 355 - RNA, 1488 nt, synthetic construct
  source 1..1488: mol_type = other RNA
atggattggatctggcgcatcctgtttctcgtgggagctgccacaggcgcccactctcaagttcacctgacacagtctggccccgaagtgcggaagcctggcacaagcgtgaaggtgtcctgtaaagcccctggcaacaccctgaaaacctacgacctgcactgggtccgatctgtgcctggacaaggactgcagtggatgggctggattagccacgagggcgacaagaaagtgatcgtggaacggttcaaggccaaagtgaccatcgactgggacagaagcaccaacaccgcctacctgcagctgagcggactgacatctggcgataccgccgtgtactactgtgccaagggcagcaagcaccggctgagagattacgccctgtacgacgatgacggcgccctgaattgggccgtcgatgtggactacctgagcaacctggaattctggggccagggaacagccgtgacagtgtctagtgcatctgtggccgctcctagcgtgttcatcttcccacctagcgacgaggaactgaagtctggcacagccagcgtcgtgtgcctgctgaacaacttctaccccagagaagccaaggtgcagtggaaggtggacaacgccctgcagagcggcaatagccaagagagcgtgaccgagcaggacagcaaggactctacctacagcctgagcagcaccctgacactgagcaaggccgactacgagaagcacaaagtgtacgcctgcgaagtgacccaccagggcctttctagccctgtgaccaagagcttcaaccggggcgagtgcgataagacccacacctgtcctccatgtccagctccagaactgctggccggaccttccgtgttcctgtttcctccaaagcctaaggacaccctgatgatcagcagaacccctgaagtgacctgcgtggtggtggatgtgtctcacgaggaccctgaagtgaagttcaattggtacgtggacggcgtggaagtgcacaacgccaagaccaagcctagagaggaacagtacaacagcacctacagagtggtgtccgtgctgaccgtgctgcaccaggattggctgaacggcaaagagtacaagtgcaaggtgtccaacaaggccctgcctgcccctatcgaaaagaccatcagcaaggccaagggccagcctcgcgaacctcaagtctgtacactgcctcctagccgcgacgaactgaccaagaaccaggtgtccctgagctgcgccgtgaagggcttttacccttccgatatcgccgtggaatgggagagcaatggccagcctgagaacaactacaagacaacccctcctgtgctggacagcgacggctcattcttcctggtgtccaagctgacagtggacaagagcagatggcagcagggcaacgtgttcagctgcagcgtgctgcatgaagccctgcacagccactacacccagaagtccctgtctctgagccccggcaagtgataa

SEQ ID NO: 356 - RNA, 1488 nt, synthetic construct
  source 1..1488: mol_type = other RNA
atggattggatctggcgcatcctgtttctcgtgggagctgccacaggcgcccactctcaagttcacctgacacagtctggccccgaagtgcggaagcctggcacaagcgtgaaggtgtcctgtaaagcccctggcaacaccctgaaaacctacgacctgcactgggtccgatctgtgcctggacaaggactgcagtggatgggctggattagccacgagggcgacaagaaagtgatcgtggaacggttcaaggccaaagtgaccatcgactgggacagaagcaccaacaccgcctacctgcagctgagcggactgacatctggcgataccgccgtgtactactgtgccaagggcagcaagcaccggctgagagattacgccctgtacgacgatgacggcgccctgaattgggccgtcgatgtggactacctgagcaacctggaattctggggccagggaacagccgtgacagtgtctagtgcatctgtggccgctcctagcgtgttcatcttcccacctagcgacgaggaactgaagtctggcacagccagcgtcgtgtgcctgctgaacaacttctaccccagagaagccaaggtgcagtggaaggtggacaacgccctgcagagcggcaatagccaagagagcgtgaccgagcaggacagcaaggactctacctacagcctgagcagcaccctgacactgagcaaggccgactacgagaagcacaaagtgtacgcctgcgaagtgacccaccagggcctttctagccctgtgaccaagagcttcaaccggggcgagtgcgataagacccacacctgtcctccatgtccagctccagaactgctgggcggaccttccgtgttcctgtttcctccaaagcctaaggacaccctgatgatcagcagaacccctgaagtgacctgcgtggtggtggatgtgtctcacgaggaccctgaagtgaagttcaattggtacgtggacggcgtggaagtgcacaacgccaagaccaagcctagagaggaacagtacaacagcacctacagagtggtgtccgtgctgaccgtgctgcaccaggattggctgaacggcaaagagtacaagtgcaaggtgtccaacaaggccctgcctgcccctgaggaaaagaccatcagcaaggccaagggccagcctcgcgaacctcaagtctgtacactgcctcctagccgcgacgaactgaccaagaaccaggtgtccctgagctgcgccgtgaagggcttttacccttccgatatcgccgtggaatgggagagcaatggccagcctgagaacaactacaagacaacccctcctgtgctggacagcgacggctcattcttcctggtgtccaagctgacagtggacaagagcagatggcagcagggcaacgtgttcagctgcagcgtgctgcatgaagccctgcacagccactacacccagaagtccctgtctctgagccccggcaagtgataa

SEQ ID NO: 357 - RNA, 1488 nt, synthetic construct
  source 1..1488: mol_type = other RNA
atggattggatctggcgcatcctgtttctcgtgggagctgccacaggcgcccactctcaagttcacctgacacagtctggccccgaagtgcggaagcctggcacaagcgtgaaggtgtcctgtaaagcccctggcaacaccctgaaaacctacgacctgcactgggtccgatctgtgcctggacaaggactgcagtggatgggctggattagccacgagggcgacaagaaagtgatcgtggaacggttcaaggccaaagtgaccatcgactgggacagaagcaccaacaccgcctacctgcagctgagcggactgacatctggcgataccgccgtgtactactgtgccaagggcagcaagcaccggctgagagattacgccctgtacgacgatgacggcgccctgaattgggccgtcgatgtggactacctgagcaacctggaattctggggccagggaacagccgtgacagtgtctagtgcatctgtggccgctcctagcgtgttcatcttcccacctagcgacgaggaactgaagtctggcacagccagcgtcgtgtgcctgctgaacaacttctaccccagagaagccaaggtgcagtggaaggtggacaacgccctgcagagcggcaatagccaagagagcgtgaccgagcaggacagcaaggactctacctacagcctgagcagcaccctgacactgagcaaggccgactacgagaagcacaaagtgtacgcctgcgaagtgacccaccagggcctttctagccctgtgaccaagagcttcaaccggggcgagtgcgataagacccacacctgtcctccatgtccagctccagaactgctcggcggaccttccgtgttcctgtttcctccaaagcctaaggacaccctgatgatcagcagaacccctgaagtgacctgcgtggtggtggatgtgtctcacgaggaccccgaagtgaagttcaattggtacgtggacggcgtggaagtgcacaacgccaagaccaagcctagagaggaacagtacaacagcacctacagagtggtgtccgtgctgacagtgctgcaccaggattggctgaacggcaaagagtacaagtgcaaggtgtccaacaaggccctgcctgctcctatcgagaaaaccatcagcaaggccaagggccagcctagggaaccccaggtttacaccctgcctccatgccgcgacgaactgaccaagaaccaggtgtccctgtggtgcctggtcaagggcttctacccttccgatatcgccgtggaatgggagagcaatggccagcctgagaacaactacaagacaacccctcctgtgctggacagcgacggctcattcttcctgtacagcaagctgacagtggacaagagcagatggcagcagggcaacgtgttcagctgcagcgtgctgcatgaagccctgcacagccactacacccagaagtccctgtctctgagccccggcaagtgataa

SEQ ID NO: 358 - RNA, 1488 nt, synthetic construct
  source 1..1488: mol_type = other RNA
atggattggatctggcgcatcctgtttctcgtgggagctgccacaggcgcccactctcaagttcacctgacacagtctggccccgaagtgcggaagcctggcacaagcgtgaaggtgtcctgtaaagcccctggcaacaccctgaaaacctacgacctgcactgggtccgatctgtgcctggacaaggactgcagtggatgggctggattagccacgagggcgacaagaaagtgatcgtggaacggttcaaggccaaagtgaccatcgactgggacagaagcaccaacaccgcctacctgcagctgagcggactgacatctggcgataccgccgtgtactactgtgccaagggcagcaagcaccggctgagagattacgccctgtacgacgatgacggcgccctgaattgggccgtcgatgtggactacctgagcaacctggaattctggggccagggaacagccgtgacagtgtctagtgcatctgtggccgctcctagcgtgttcatcttcccacctagcgacgaggaactgaagtctggcacagccagcgtcgtgtgcctgctgaacaacttctaccccagagaagccaaggtgcagtggaaggtggacaacgccctgcagagcggcaatagccaagagagcgtgaccgagcaggacagcaaggactctacctacagcctgagcagcaccctgacactgagcaaggccgactacgagaagcacaaagtgtacgcctgcgaagtgacccaccagggcctttctagccctgtgaccaagagcttcaaccggggcgagtgcgataagacccacacctgtcctccatgtccagctccagaactgctggccggaccttccgtgttcctgtttcctccaaagcctaaggacaccctgatgatcagcagaacccctgaagtgacctgcgtggtggtggatgtgtctcacgaggaccccgaagtgaagttcaattggtacgtggacggcgtggaagtgcacaatgccaagaccaagcctagagaggaacagtacaacagcacctacagagtggtgtccgtgctgaccgtgctgcaccaggattggctgaacggcaaagagtacaagtgcaaggtgtccaacaaggccctgcctctgcctgaggaaaagaccatcagcaaggccaagggccagcctagggaaccccaggtttacaccctgcctccatgccgcgacgaactgaccaagaaccaggtgtccctgtggtgcctggtcaagggcttctacccttccgatatcgccgtggaatgggagagcaatggccagcctgagaacaactacaagacaacccctcctgtgctggacagcgacggctcattcttcctgtacagcaagctgacagtggacaagagcagatggcagcagggcaacgtgttcagctgcagcgtgctgcatgaagccctgcacagccactacacccagaagtccctgtctctgagccccggcaagtgataa

SEQ ID NO: 359 - RNA, 1488 nt, synthetic construct
  source 1..1488: mol_type = other RNA
atggattggatctggcgcatcctgtttctcgtgggagctgccacaggcgcccactctcaagttcacctgacacagtctggccccgaagtgcggaagcctggcacaagcgtgaaggtgtcctgtaaagcccctggcaacaccctgaaaacctacgacctgcactgggtccgatctgtgcctggacaaggactgcagtggatgggctggattagccacgagggcgacaagaaagtgatcgtggaacggttcaaggccaaagtgaccatcgactgggacagaagcaccaacaccgcctacctgcagctgagcggactgacatctggcgataccgccgtgtactactgtgccaagggcagcaagcaccggctgagagattacgccctgtacgacgatgacggcgccctgaattgggccgtcgatgtggactacctgagcaacctggaattctggggccagggaacagccgtgacagtgtctagtgcatctgtggccgctcctagcgtgttcatcttcccacctagcgacgaggaactgaagtctggcacagccagcgtcgtgtgcctgctgaacaacttctaccccagagaagccaaggtgcagtggaaggtggacaacgccctgcagagcggcaatagccaagagagcgtgaccgagcaggacagcaaggactctacctacagcctgagcagcaccctgacactgagcaaggccgactacgagaagcacaaagtgtacgcctgcgaagtgacccaccagggcctttctagccctgtgaccaagagcttcaaccggggcgagtgcgataagacccacacctgtcctccatgtccagctccagaactgctggccggaccttccgtgttcctgtttcctccaaagcctaaggacaccctgatgatcagcagaacccctgaagtgacctgcgtggtggtggatgtgtctcacgaggaccctgaagtgaagttcaattggtacgtggacggcgtggaagtgcacaacgccaagaccaagcctagagaggaacagtacaacagcacctacagagtggtgtccgtgctgaccgtgctgcaccaggattggctgaacggcaaagagtacaagtgcaaggtgtccaacaaggccctgcctgcccctgaggaaaagaccatcagcaaggccaagggccagcctagggaaccccaggtttacaccctgcctccatgccgcgacgaactgaccaagaaccaggtgtccctgtggtgcctggtcaagggcttctacccttccgatatcgccgtggaatgggagagcaatggccagcctgagaacaactacaagacaacccctcctgtgctggacagcgacggctcattcttcctgtacagcaagctgacagtggacaagagcagatggcagcagggcaacgtgttcagctgcagcgtgctgcatgaagccctgcacagccactacacccagaagtccctgtctctgagccccggcaagtgataa

SEQ ID NO: 360 - RNA, 1488 nt, synthetic construct
  source 1..1488: mol_type = other RNA
atggattggatctggcgcatcctgtttctcgtgggagctgccacaggcgcccactctcaagttcacctgacacagtctggccccgaagtgcggaagcctggcacaagcgtgaaggtgtcctgtaaagcccctggcaacaccctgaaaacctacgacctgcactgggtccgatctgtgcctggacaaggactgcagtggatgggctggattagccacgagggcgacaagaaagtgatcgtggaacggttcaaggccaaagtgaccatcgactgggacagaagcaccaacaccgcctacctgcagctgagcggactgacatctggcgataccgccgtgtactactgtgccaagggcagcaagcaccggctgagagattacgccctgtacgacgatgacggcgccctgaattgggccgtcgatgtggactacctgagcaacctggaattctggggccagggaacagccgtgacagtgtctagtgcatctgtggccgctcctagcgtgttcatcttcccacctagcgacgaggaactgaagtctggcacagccagcgtcgtgtgcctgctgaacaacttctaccccagagaagccaaggtgcagtggaaggtggacaacgccctgcagagcggcaatagccaagagagcgtgaccgagcaggacagcaaggactctacctacagcctgagcagcaccctgacactgagcaaggccgactacgagaagcacaaagtgtacgcctgcgaagtgacccaccagggcctttctagccctgtgaccaagagcttcaaccggggcgagtgcgataagacccacacctgtcctccatgtccagctccagaactgctggccggaccttccgtgttcctgtttcctccaaagcctaaggacaccctgatgatcagcagaacccctgaagtgacctgcgtggtggtggatgtgtctcacgaggaccctgaagtgaagttcaattggtacgtggacggcgtggaagtgcacaacgccaagaccaagcctagagaggaacagtacaacagcacctacagagtggtgtccgtgctgaccgtgctgcaccaggattggctgaacggcaaagagtacaagtgcaaggtgtccaacaaggccctgcctgcccctatcgaaaagaccatcagcaaggccaagggccagcctagggaaccccaggtttacaccctgcctccatgccgcgacgaactgaccaagaaccaggtgtccctgtggtgcctggtcaagggcttctacccttccgatatcgccgtggaatgggagagcaatggccagcctgagaacaactacaagacaacccctcctgtgctggacagcgacggctcattcttcctgtacagcaagctgacagtggacaagagcagatggcagcagggcaacgtgttcagctgcagcgtgctgcatgaagccctgcacagccactacacccagaagtccctgtctctgagccccggcaagtgataa

SEQ ID NO: 361 - RNA, 1488 nt, synthetic construct
  source 1..1488: mol_type = other RNA
atggattggatctggcgcatcctgtttctcgtgggagctgccacaggcgcccactctcaagttcacctgacacagtctggccccgaagtgcggaagcctggcacaagcgtgaaggtgtcctgtaaagcccctggcaacaccctgaaaacctacgacctgcactgggtccgatctgtgcctggacaaggactgcagtggatgggctggattagccacgagggcgacaagaaagtgatcgtggaacggttcaaggccaaagtgaccatcgactgggacagaagcaccaacaccgcctacctgcagctgagcggactgacatctggcgataccgccgtgtactactgtgccaagggcagcaagcaccggctgagagattacgccctgtacgacgatgacggcgccctgaattgggccgtcgatgtggactacctgagcaacctggaattctggggccagggaacagccgtgacagtgtctagtgcatctgtggccgctcctagcgtgttcatcttcccacctagcgacgaggaactgaagtctggcacagccagcgtcgtgtgcctgctgaacaacttctaccccagagaagccaaggtgcagtggaaggtggacaacgccctgcagagcggcaatagccaagagagcgtgaccgagcaggacagcaaggactctacctacagcctgagcagcaccctgacactgagcaaggccgactacgagaagcacaaagtgtacgcctgcgaagtgacccaccagggcctttctagccctgtgaccaagagcttcaaccggggcgagtgcgataagacccacacctgtcctccatgtccagctccagaactgctgggcggaccttccgtgttcctgtttcctccaaagcctaaggacaccctgatgatcagcagaacccctgaagtgacctgcgtggtggtggatgtgtctcacgaggaccctgaagtgaagttcaattggtacgtggacggcgtggaagtgcacaacgccaagaccaagcctagagaggaacagtacaacagcacctacagagtggtgtccgtgctgaccgtgctgcaccaggattggctgaacggcaaagagtacaagtgcaaggtgtccaacaaggccctgcctgcccctgaggaaaagaccatcagcaaggccaagggccagcctagggaaccccaggtttacaccctgcctccatgccgcgacgaactgaccaagaaccaggtgtccctgtggtgcctggtcaagggcttctacccttccgatatcgccgtggaatgggagagcaatggccagcctgagaacaactacaagacaacccctcctgtgctggacagcgacggctcattcttcctgtacagcaagctgacagtggacaagagcagatggcagcagggcaacgtgttcagctgcagcgtgctgcatgaagccctgcacagccactacacccagaagtccctgtctctgagccccggcaagtgataa

SEQ ID NO: 362 - DNA, 1476 bp, synthetic construct
  source 1..1476: mol_type = other DNA
atggattggatctggcgcatcctgtttctcgtgggagctgccacaggcgcccactctcaagttcacctgacacagtctggccccgaagtgcggaagcctggcacaagcgtgaaggtgtcctgtaaagcccctggcaacaccctgaaaacctacgacctgcactgggtccgatctgtgcctggacaaggactgcagtggatgggctggattagccacgagggcgacaagaaagtgatcgtggaacggttcaaggccaaagtgaccatcgactgggacagaagcaccaacaccgcctacctgcagctgagcggactgacatctggcgataccgccgtgtactactgtgccaagggcagcaagcaccggctgagagattacgccctgtacgacgatgacggcgccctgaattgggccgtcgatgtggactacctgagcaacctggaattctggggccagggaacagccgtgacagtgtctagtgcttccacaaagggccctagcgtgttccctctggctcctagcagcaagtctacaagcggaggaacagctgccctgggctgcctggtggaagattactttcctgagcctgtgaccgtgtcctggaacagcggtgctctgacttctggcgtgcacacctttccagccgtgctgcaaagcagcggcctgtactctctgagcagcgtggtcacagtgccaagctctagcctgggcacccagacctacatctgcaatgtgaaccacaagcctagcaacaccaaggtggacgacagagtggaacccaagagctgcgacaagacccacacctgtcctccatgtcctgctccagaactgctcggcggaccttccgtgttcctgtttcctccaaagcctaaggacaccctgatgatcagcagaacccctgaagtgacctgcgtggtggtggatgtgtctcacgaggaccccgaagtgaagttcaattggtacgtggacggcgtggaagtgcacaacgccaagaccaagcctagagaggaacagtacaacagcacctacagagtggtgtccgtgctgacagtgctgcaccaggattggctgaacggcaaagagtacaagtgcaaggtgtccaacaaggccctgcctgctcctatcgagaaaaccatcagcaaggccaagggccagcctagggaaccccaggtttacacactgcctccaagccgcgaggaaatgaccaagaaccaggtgtccctgacctgcctcgtgaagggcttctacccttccgatatcgccgtggaatgggagagcaatggccagcctgagaacaactacaagacaacccctcctgtgctggacagcgacggctcattcttcctgtacagcaagctgactgtggataagtcccggtggcagcagggcaacgtgttcagctgttctgtgatgcacgaagccctgcacaaccactacacccagaaaagcctgtctctgagccccggcaagtgataa

SEQ ID NO: 363 - DNA, 1476 bp, synthetic construct
  source 1..1476: mol_type = other DNA
atggattggatctggcgcatcctgtttctcgtgggagctgccacaggcgcccactctcaagttcacctgacacagtctggccccgaagtgcggaagcctggcacaagcgtgaaggtgtcctgtaaagcccctggcaacaccctgaaaacctacgacctgcactgggtccgatctgtgcctggacaaggactgcagtggatgggctggattagccacgagggcgacaagaaagtgatcgtggaacggttcaaggccaaagtgaccatcgactgggacagaagcaccaacaccgcctacctgcagctgagcggactgacatctggcgataccgccgtgtactactgtgccaagggcagcaagcaccggctgagagattacgccctgtacgacgatgacggcgccctgaattgggccgtcgatgtggactacctgagcaacctggaattctggggccagggaacagccgtgacagtgtctagtgcttccacaaagggccctagcgtgttccctctggctcctagcagcaagtctacaagcggaggaacagctgccctgggctgcctggtggaagattactttcctgagcctgtgaccgtgtcctggaacagcggtgctctgacttctggcgtgcacacctttccagccgtgctgcaaagcagcggcctgtactctctgagcagcgtggtcacagtgccaagctctagcctgggcacccagacctacatctgcaatgtgaaccacaagcctagcaacaccaaggtggacgacagagtggaacccaagagctgcgacaagacccacacctgtcctccatgtcctgctccagaactgctcggcggaccttccgtgttcctgtttcctccaaagcctaaggacaccctgatgatcagcagaacccctgaagtgacctgcgtggtggtggatgtgtctcacgaggaccccgaagtgaagttcaattggtacgtggacggcgtggaagtgcacaacgccaagaccaagcctagagaggaacagtacaacagcacctacagagtggtgtccgtgctgacagtgctgcaccaggattggctgaacggcaaagagtacaagtgcaaggtgtccaacaaggccctgcctgctcctatcgagaaaaccatcagcaaggccaagggccagcctagggaaccccaggtttacacactgcctccaagccgcgaggaaatgaccaagaaccaggtgtccctgacctgcctcgtgaagggcttctacccttccgatatcgccgtggaatgggagagcaatggccagcctgagaacaactacaagacaacccctcctgtgctggacagcgacggctcattcttcctgtacagcaagctgaccgtggacaagtccagatggcagcagggcaacgtgttcagctgtagcgtgctgcacgaagccctgcacagccactacacccagaaaagcctgtctctgagccccggcaaatgataa

SEQ ID NO: 364 - DNA, 1476 bp, synthetic construct
  source 1..1476: mol_type = other DNA
atggattggatctggcgcatcctgtttctcgtgggagctgccacaggcgcccactctcaagttcacctgacacagtctggccccgaagtgcggaagcctggcacaagcgtgaaggtgtcctgtaaagcccctggcaacaccctgaaaacctacgacctgcactgggtccgatctgtgcctggacaaggactgcagtggatgggctggattagccacgagggcgacaagaaagtgatcgtggaacggttcaaggccaaagtgaccatcgactgggacagaagcaccaacaccgcctacctgcagctgagcggactgacatctggcgataccgccgtgtactactgtgccaagggcagcaagcaccggctgagagattacgccctgtacgacgatgacggcgccctgaattgggccgtcgatgtggactacctgagcaacctggaattctggggccagggaacagccgtgacagtgtctagtgcttccacaaagggccctagcgtgttccctctggctcctagcagcaagtctacaagcggaggaacagctgccctgggctgcctggtggaagattactttcctgagcctgtgaccgtgtcctggaacagcggtgctctgacttctggcgtgcacacctttccagccgtgctgcaaagcagcggcctgtactctctgagcagcgtggtcacagtgccaagctctagcctgggcacccagacctacatctgcaatgtgaaccacaagcctagcaacaccaaggtggacgacagagtggaacccaagagctgcgacaagacccacacctgtcctccatgtcctgctccagaactgctggccggaccttccgtgttcctgtttcctccaaagcctaaggacaccctgatgatcagcagaacccctgaagtgacctgcgtggtggtggatgtgtctcacgaggaccccgaagtgaagttcaattggtacgtggacggcgtggaagtgcacaatgccaagaccaagcctagagaggaacagtacaacagcacctacagagtggtgtccgtgctgaccgtgctgcaccaggattggctgaacggcaaagagtacaagtgcaaggtgtccaacaaggccctgcctctgcctgaggaaaagaccatcagcaaggccaagggccagcctagggaaccccaggtttacacactgcctccaagccgcgaggaaatgaccaagaaccaggtgtccctgacctgcctcgtgaagggcttctacccttccgatatcgccgtggaatgggagagcaatggccagcctgagaacaactacaagacaacccctcctgtgctggacagcgacggctcattcttcctgtacagcaagctgaccgtggacaagtccagatggcagcagggcaacgtgttcagctgtagcgtgctgcacgaagccctgcacagccactacacccagaaaagcctgtctctgagccccggcaaatgataa

SEQ ID NO: 365 - DNA, 1476 bp, synthetic construct
  source 1..1476: mol_type = other DNA
atggattggatctggcgcatcctgtttctcgtgggagctgccacaggcgcccactctcaagttcacctgacacagtctggccccgaagtgcggaagcctggcacaagcgtgaaggtgtcctgtaaagcccctggcaacaccctgaaaacctacgacctgcactgggtccgatctgtgcctggacaaggactgcagtggatgggctggattagccacgagggcgacaagaaagtgatcgtggaacggttcaaggccaaagtgaccatcgactgggacagaagcaccaacaccgcctacctgcagctgagcggactgacatctggcgataccgccgtgtactactgtgccaagggcagcaagcaccggctgagagattacgccctgtacgacgatgacggcgccctgaattgggccgtcgatgtggactacctgagcaacctggaattctggggccagggaacagccgtgacagtgtctagtgcttccacaaagggccctagcgtgttccctctggctcctagcagcaagtctacaagcggaggaacagctgccctgggctgcctggtggaagattactttcctgagcctgtgaccgtgtcctggaacagcggtgctctgacttctggcgtgcacacctttccagccgtgctgcaaagcagcggcctgtactctctgagcagcgtggtcacagtgccaagctctagcctgggcacccagacctacatctgcaatgtgaaccacaagcctagcaacaccaaggtggacgacagagtggaacccaagagctgcgacaagacccacacctgtcctccatgtcctgctccagaactgctggccggaccttccgtgttcctgtttcctccaaagcctaaggacaccctgatgatcagcagaacccctgaagtgacctgcgtggtggtggatgtgtctcacgaggaccctgaagtgaagttcaattggtacgtggacggcgtggaagtgcacaacgccaagaccaagcctagagaggaacagtacaacagcacctacagagtggtgtccgtgctgaccgtgctgcaccaggattggctgaacggcaaagagtacaagtgcaaggtgtccaacaaggccctgcctgcccctgaggaaaagaccatcagcaaggccaagggccagcctagggaaccccaggtttacacactgcctccaagccgcgaggaaatgaccaagaaccaggtgtccctgacctgcctcgtgaagggcttctacccttccgatatcgccgtggaatgggagagcaatggccagcctgagaacaactacaagacaacccctcctgtgctggacagcgacggctcattcttcctgtacagcaagctgaccgtggacaagtccagatggcagcagggcaacgtgttcagctgtagcgtgctgcacgaagccctgcacagccactacacccagaaaagcctgtctctgagccccggcaaatgataa

SEQ ID NO: 366 - DNA, 1476 bp, synthetic construct
  source 1..1476: mol_type = other DNA
atggattggatctggcgcatcctgtttctcgtgggagctgccacaggcgcccactctcaagttcacctgacacagtctggccccgaagtgcggaagcctggcacaagcgtgaaggtgtcctgtaaagcccctggcaacaccctgaaaacctacgacctgcactgggtccgatctgtgcctggacaaggactgcagtggatgggctggattagccacgagggcgacaagaaagtgatcgtggaacggttcaaggccaaagtgaccatcgactgggacagaagcaccaacaccgcctacctgcagctgagcggactgacatctggcgataccgccgtgtactactgtgccaagggcagcaagcaccggctgagagattacgccctgtacgacgatgacggcgccctgaattgggccgtcgatgtggactacctgagcaacctggaattctggggccagggaacagccgtgacagtgtctagtgcttccacaaagggccctagcgtgttccctctggctcctagcagcaagtctacaagcggaggaacagctgccctgggctgcctggtggaagattactttcctgagcctgtgaccgtgtcctggaacagcggtgctctgacttctggcgtgcacacctttccagccgtgctgcaaagcagcggcctgtactctctgagcagcgtggtcacagtgccaagctctagcctgggcacccagacctacatctgcaatgtgaaccacaagcctagcaacaccaaggtggacgacagagtggaacccaagagctgcgacaagacccacacctgtcctccatgtcctgctccagaactgctggccggaccttccgtgttcctgtttcctccaaagcctaaggacaccctgatgatcagcagaacccctgaagtgacctgcgtggtggtggatgtgtctcacgaggaccctgaagtgaagttcaattggtacgtggacggcgtggaagtgcacaacgccaagaccaagcctagagaggaacagtacaacagcacctacagagtggtgtccgtgctgaccgtgctgcaccaggattggctgaacggcaaagagtacaagtgcaaggtgtccaacaaggccctgcctgcccctatcgaaaagaccatcagcaaggccaagggccagcctagggaaccccaggtttacacactgcctccaagccgcgaggaaatgaccaagaaccaggtgtccctgacctgcctcgtgaagggcttctacccttccgatatcgccgtggaatgggagagcaatggccagcctgagaacaactacaagacaacccctcctgtgctggacagcgacggctcattcttcctgtacagcaagctgaccgtggacaagtccagatggcagcagggcaacgtgttcagctgtagcgtgctgcacgaagccctgcacagccactacacccagaaaagcctgtctctgagccccggcaaatgataa

SEQ ID NO: 367 - DNA, 1476 bp, synthetic construct
  source 1..1476: mol_type = other DNA
atggattggatctggcgcatcctgtttctcgtgggagctgccacaggcgcccactctcaagttcacctgacacagtctggccccgaagtgcggaagcctggcacaagcgtgaaggtgtcctgtaaagcccctggcaacaccctgaaaacctacgacctgcactgggtccgatctgtgcctggacaaggactgcagtggatgggctggattagccacgagggcgacaagaaagtgatcgtggaacggttcaaggccaaagtgaccatcgactgggacagaagcaccaacaccgcctacctgcagctgagcggactgacatctggcgataccgccgtgtactactgtgccaagggcagcaagcaccggctgagagattacgccctgtacgacgatgacggcgccctgaattgggccgtcgatgtggactacctgagcaacctggaattctggggccagggaacagccgtgacagtgtctagtgcttccacaaagggccctagcgtgttccctctggctcctagcagcaagtctacaagcggaggaacagctgccctgggctgcctggtggaagattactttcctgagcctgtgaccgtgtcctggaacagcggtgctctgacttctggcgtgcacacctttccagccgtgctgcaaagcagcggcctgtactctctgagcagcgtggtcacagtgccaagctctagcctgggcacccagacctacatctgcaatgtgaaccacaagcctagcaacaccaaggtggacgacagagtggaacccaagagctgcgacaagacccacacctgtcctccatgtcctgctccagaactgctgggcggaccttccgtgttcctgtttcctccaaagcctaaggacaccctgatgatcagcagaacccctgaagtgacctgcgtggtggtggatgtgtctcacgaggaccctgaagtgaagttcaattggtacgtggacggcgtggaagtgcacaacgccaagaccaagcctagagaggaacagtacaacagcacctacagagtggtgtccgtgctgaccgtgctgcaccaggattggctgaacggcaaagagtacaagtgcaaggtgtccaacaaggccctgcctgcccctgaggaaaagaccatcagcaaggccaagggccagcctagggaaccccaggtttacacactgcctccaagccgcgaggaaatgaccaagaaccaggtgtccctgacctgcctcgtgaagggcttctacccttccgatatcgccgtggaatgggagagcaatggccagcctgagaacaactacaagacaacccctcctgtgctggacagcgacggctcattcttcctgtacagcaagctgaccgtggacaagtccagatggcagcagggcaacgtgttcagctgtagcgtgctgcacgaagccctgcacagccactacacccagaaaagcctgtctctgagccccggcaaatgataa

SEQ ID NO: 368 - DNA, 1476 bp, synthetic construct
  source 1..1476: mol_type = other DNA
atggattggatctggcgcatcctgtttctcgtgggagctgccacaggcgcccactctcaagttcacctgacacagtctggccccgaagtgcggaagcctggcacaagcgtgaaggtgtcctgtaaagcccctggcaacaccctgaaaacctacgacctgcactgggtccgatctgtgcctggacaaggactgcagtggatgggctggattagccacgagggcgacaagaaagtgatcgtggaacggttcaaggccaaagtgaccatcgactgggacagaagcaccaacaccgcctacctgcagctgagcggactgacatctggcgataccgccgtgtactactgtgccaagggcagcaagcaccggctgagagattacgccctgtacgacgatgacggcgccctgaattgggccgtcgatgtggactacctgagcaacctggaattctggggccagggaacagccgtgacagtgtctagtgcttccacaaagggccctagcgtgttccctctggctcctagcagcaagtctacaagcggaggaacagctgccctgggctgcctggtggaagattactttcctgagcctgtgaccgtgtcctggaacagcggtgctctgacttctggcgtgcacacctttccagccgtgctgcaaagcagcggcctgtactctctgagcagcgtggtcacagtgccaagctctagcctgggcacccagacctacatctgcaatgtgaaccacaagcctagcaacaccaaggtggacgacagagtggaacccaagagctgcgacaagacccacacctgtcctccatgtcctgctccagaactgctcggcggaccttccgtgttcctgtttcctccaaagcctaaggacaccctgatgatcagcagaacccctgaagtgacctgcgtggtggtggatgtgtctcacgaggaccccgaagtgaagttcaattggtacgtggacggcgtggaagtgcacaacgccaagaccaagcctagagaggaacagtacaacagcacctacagagtggtgtccgtgctgacagtgctgcaccaggattggctgaacggcaaagagtacaagtgcaaggtgtccaacaaggccctgcctgctcctatcgagaaaaccatcagcaaggccaagggccagcctagggaaccccaagtctgtacactgcctcctagccgcgaggaaatgaccaagaaccaggtgtccctgagctgcgccgtgaagggcttttacccttccgatatcgccgtggaatgggagagcaatggccagcctgagaacaactacaagacaacccctcctgtgctggacagcgacggctcattcttcctggtgtccaagctgacagtggacaagagcagatggcagcagggcaacgtgttcagctgctctgtgctgcacgaagccctgcacagccactacacccagaagtccctgtctctgagccccggcaagtgataa

SEQ ID NO: 369 - DNA, 1476 bp, synthetic construct
  source 1..1476: mol_type = other DNA
atggattggatctggcgcatcctgtttctcgtgggagctgccacaggcgcccactctcaagttcacctgacacagtctggccccgaagtgcggaagcctggcacaagcgtgaaggtgtcctgtaaagcccctggcaacaccctgaaaacctacgacctgcactgggtccgatctgtgcctggacaaggactgcagtggatgggctggattagccacgagggcgacaagaaagtgatcgtggaacggttcaaggccaaagtgaccatcgactgggacagaagcaccaacaccgcctacctgcagctgagcggactgacatctggcgataccgccgtgtactactgtgccaagggcagcaagcaccggctgagagattacgccctgtacgacgatgacggcgccctgaattgggccgtcgatgtggactacctgagcaacctggaattctggggccagggaacagccgtgacagtgtctagtgcttccacaaagggccctagcgtgttccctctggctcctagcagcaagtctacaagcggaggaacagctgccctgggctgcctggtggaagattactttcctgagcctgtgaccgtgtcctggaacagcggtgctctgacttctggcgtgcacacctttccagccgtgctgcaaagcagcggcctgtactctctgagcagcgtggtcacagtgccaagctctagcctgggcacccagacctacatctgcaatgtgaaccacaagcctagcaacaccaaggtggacgacagagtggaacccaagagctgcgacaagacccacacctgtcctccatgtcctgctccagaactgctggccggaccttccgtgttcctgtttcctccaaagcctaaggacaccctgatgatcagcagaacccctgaagtgacctgcgtggtggtggatgtgtctcacgaggaccccgaagtgaagttcaattggtacgtggacggcgtggaagtgcacaatgccaagaccaagcctagagaggaacagtacaacagcacctacagagtggtgtccgtgctgaccgtgctgcaccaggattggctgaacggcaaagagtacaagtgcaaggtgtccaacaaggccctgcctctgcctgaggaaaagaccatcagcaaggccaagggccagcctagggaaccccaagtctgtacactgcctcctagccgcgaggaaatgaccaagaaccaggtgtccctgagctgcgccgtgaagggcttttacccttccgatatcgccgtggaatgggagagcaatggccagcctgagaacaactacaagacaacccctcctgtgctggacagcgacggctcattcttcctggtgtccaagctgacagtggacaagagcagatggcagcagggcaacgtgttcagctgctctgtgctgcacgaagccctgcacagccactacacccagaagtccctgtctctgagccccggcaagtgataa

SEQ ID NO: 370 - DNA, 1476 bp, synthetic construct
  source 1..1476: mol_type = other DNA
atggattggatctggcgcatcctgtttctcgtgggagctgccacaggcgcccactctcaagttcacctgacacagtctggccccgaagtgcggaagcctggcacaagcgtgaaggtgtcctgtaaagcccctggcaacaccctgaaaacctacgacctgcactgggtccgatctgtgcctggacaaggactgcagtggatgggctggattagccacgagggcgacaagaaagtgatcgtggaacggttcaaggccaaagtgaccatcgactgggacagaagcaccaacaccgcctacctgcagctgagcggactgacatctggcgataccgccgtgtactactgtgccaagggcagcaagcaccggctgagagattacgccctgtacgacgatgacggcgccctgaattgggccgtcgatgtggactacctgagcaacctggaattctggggccagggaacagccgtgacagtgtctagtgcttccacaaagggccctagcgtgttccctctggctcctagcagcaagtctacaagcggaggaacagctgccctgggctgcctggtggaagattactttcctgagcctgtgaccgtgtcctggaacagcggtgctctgacttctggcgtgcacacctttccagccgtgctgcaaagcagcggcctgtactctctgagcagcgtggtcacagtgccaagctctagcctgggcacccagacctacatctgcaatgtgaaccacaagcctagcaacaccaaggtggacgacagagtggaacccaagagctgcgacaagacccacacctgtcctccatgtcctgctccagaactgctggccggaccttccgtgttcctgtttcctccaaagcctaaggacaccctgatgatcagcagaacccctgaagtgacctgcgtggtggtggatgtgtctcacgaggaccctgaagtgaagttcaattggtacgtggacggcgtggaagtgcacaacgccaagaccaagcctagagaggaacagtacaacagcacctacagagtggtgtccgtgctgaccgtgctgcaccaggattggctgaacggcaaagagtacaagtgcaaggtgtccaacaaggccctgcctgcccctgaggaaaagaccatcagcaaggccaagggccagcctagggaaccccaagtctgtacactgcctcctagccgcgaggaaatgaccaagaaccaggtgtccctgagctgcgccgtgaagggcttttacccttccgatatcgccgtggaatgggagagcaatggccagcctgagaacaactacaagacaacccctcctgtgctggacagcgacggctcattcttcctggtgtccaagctgacagtggacaagagcagatggcagcagggcaacgtgttcagctgctctgtgctgcacgaagccctgcacagccactacacccagaagtccctgtctctgagccccggcaagtgataa

SEQ ID NO: 371 - DNA, 1476 bp, synthetic construct
  source 1..1476: mol_type = other DNA
atggattggatctggcgcatcctgtttctcgtgggagctgccacaggcgcccactctcaagttcacctgacacagtctggccccgaagtgcggaagcctggcacaagcgtgaaggtgtcctgtaaagcccctggcaacaccctgaaaacctacgacctgcactgggtccgatctgtgcctggacaaggactgcagtggatgggctggattagccacgagggcgacaagaaagtgatcgtggaacggttcaaggccaaagtgaccatcgactgggacagaagcaccaacaccgcctacctgcagctgagcggactgacatctggcgataccgccgtgtactactgtgccaagggcagcaagcaccggctgagagattacgccctgtacgacgatgacggcgccctgaattgggccgtcgatgtggactacctgagcaacctggaattctggggccagggaacagccgtgacagtgtctagtgcttccacaaagggccctagcgtgttccctctggctcctagcagcaagtctacaagcggaggaacagctgccctgggctgcctggtggaagattactttcctgagcctgtgaccgtgtcctggaacagcggtgctctgacttctggcgtgcacacctttccagccgtgctgcaaagcagcggcctgtactctctgagcagcgtggtcacagtgccaagctctagcctgggcacccagacctacatctgcaatgtgaaccacaagcctagcaacaccaaggtggacgacagagtggaacccaagagctgcgacaagacccacacctgtcctccatgtcctgctccagaactgctggccggaccttccgtgttcctgtttcctccaaagcctaaggacaccctgatgatcagcagaacccctgaagtgacctgcgtggtggtggatgtgtctcacgaggaccctgaagtgaagttcaattggtacgtggacggcgtggaagtgcacaacgccaagaccaagcctagagaggaacagtacaacagcacctacagagtggtgtccgtgctgaccgtgctgcaccaggattggctgaacggcaaagagtacaagtgcaaggtgtccaacaaggccctgcctgcccctatcgaaaagaccatcagcaaggccaagggccagcctagggaaccccaagtctgtacactgcctcctagccgcgaggaaatgaccaagaaccaggtgtccctgagctgcgccgtgaagggcttttacccttccgatatcgccgtggaatgggagagcaatggccagcctgagaacaactacaagacaacccctcctgtgctggacagcgacggctcattcttcctggtgtccaagctgacagtggacaagagcagatggcagcagggcaacgtgttcagctgctctgtgctgcacgaagccctgcacagccactacacccagaagtccctgtctctgagccccggcaagtgataa

SEQ ID NO: 372 - DNA, 1476 bp, synthetic construct
  source 1..1476: mol_type = other DNA
atggattggatctggcgcatcctgtttctcgtgggagctgccacaggcgcccactctcaagttcacctgacacagtctggccccgaagtgcggaagcctggcacaagcgtgaaggtgtcctgtaaagcccctggcaacaccctgaaaacctacgacctgcactgggtccgatctgtgcctggacaaggactgcagtggatgggctggattagccacgagggcgacaagaaagtgatcgtggaacggttcaaggccaaagtgaccatcgactgggacagaagcaccaacaccgcctacctgcagctgagcggactgacatctggcgataccgccgtgtactactgtgccaagggcagcaagcaccggctgagagattacgccctgtacgacgatgacggcgccctgaattgggccgtcgatgtggactacctgagcaacctggaattctggggccagggaacagccgtgacagtgtctagtgcttccacaaagggccctagcgtgttccctctggctcctagcagcaagtctacaagcggaggaacagctgccctgggctgcctggtggaagattactttcctgagcctgtgaccgtgtcctggaacagcggtgctctgacttctggcgtgcacacctttccagccgtgctgcaaagcagcggcctgtactctctgagcagcgtggtcacagtgccaagctctagcctgggcacccagacctacatctgcaatgtgaaccacaagcctagcaacaccaaggtggacgacagagtggaacccaagagctgcgacaagacccacacctgtcctccatgtcctgctccagaactgctgggcggaccttccgtgttcctgtttcctccaaagcctaaggacaccctgatgatcagcagaacccctgaagtgacctgcgtggtggtggatgtgtctcacgaggaccctgaagtgaagttcaattggtacgtggacggcgtggaagtgcacaacgccaagaccaagcctagagaggaacagtacaacagcacctacagagtggtgtccgtgctgaccgtgctgcaccaggattggctgaacggcaaagagtacaagtgcaaggtgtccaacaaggccctgcctgcccctgaggaaaagaccatcagcaaggccaagggccagcctagggaaccccaagtctgtacactgcctcctagccgcgaggaaatgaccaagaaccaggtgtccctgagctgcgccgtgaagggcttttacccttccgatatcgccgtggaatgggagagcaatggccagcctgagaacaactacaagacaacccctcctgtgctggacagcgacggctcattcttcctggtgtccaagctgacagtggacaagagcagatggcagcagggcaacgtgttcagctgctctgtgctgcacgaagccctgcacagccactacacccagaagtccctgtctctgagccccggcaagtgataa

SEQ ID NO: 373 - DNA, 1476 bp, synthetic construct
  source 1..1476: mol_type = other DNA
atggattggatctggcgcatcctgtttctcgtgggagctgccacaggcgcccactctcaagttcacctgacacagtctggccccgaagtgcggaagcctggcacaagcgtgaaggtgtcctgtaaagcccctggcaacaccctgaaaacctacgacctgcactgggtccgatctgtgcctggacaaggactgcagtggatgggctggattagccacgagggcgacaagaaagtgatcgtggaacggttcaaggccaaagtgaccatcgactgggacagaagcaccaacaccgcctacctgcagctgagcggactgacatctggcgataccgccgtgtactactgtgccaagggcagcaagcaccggctgagagattacgccctgtacgacgatgacggcgccctgaattgggccgtcgatgtggactacctgagcaacctggaattctggggccagggaacagccgtgacagtgtctagtgcttccacaaagggccctagcgtgttccctctggctcctagcagcaagtctacaagcggaggaacagctgccctgggctgcctggtggaagattactttcctgagcctgtgaccgtgtcctggaacagcggtgctctgacttctggcgtgcacacctttccagccgtgctgcaaagcagcggcctgtactctctgagcagcgtggtcacagtgccaagctctagcctgggcacccagacctacatctgcaatgtgaaccacaagcctagcaacaccaaggtggacgacagagtggaacccaagagctgcgacaagacccacacctgtcctccatgtcctgctccagaactgctcggcggaccttccgtgttcctgtttcctccaaagcctaaggacaccctgatgatcagcagaacccctgaagtgacctgcgtggtggtggatgtgtctcacgaggaccccgaagtgaagttcaattggtacgtggacggcgtggaagtgcacaacgccaagaccaagcctagagaggaacagtacaacagcacctacagagtggtgtccgtgctgacagtgctgcaccaggattggctgaacggcaaagagtacaagtgcaaggtgtccaacaaggccctgcctgctcctatcgagaaaaccatcagcaaggccaagggccagcctagggaaccccaggtttacaccctgcctccatgccgcgaggaaatgaccaagaaccaggtgtccctgtggtgcctcgtgaagggcttctacccttccgatatcgccgtggaatgggagagcaatggccagcctgagaacaactacaagacaacccctcctgtgctggacagcgacggctcattcttcctgtacagcaagctgaccgtggacaagtccagatggcagcagggcaacgtgttcagctgtagcgtgctgcacgaagccctgcacagccactacacccagaagtccctgtctctgagccccggcaagtgataa

SEQ ID NO: 374 - DNA, 1476 bp, synthetic construct
  source 1..1476: mol_type = other DNA
atggattggatctggcgcatcctgtttctcgtgggagctgccacaggcgcccactctcaagttcacctgacacagtctggccccgaagtgcggaagcctggcacaagcgtgaaggtgtcctgtaaagcccctggcaacaccctgaaaacctacgacctgcactgggtccgatctgtgcctggacaaggactgcagtggatgggctggattagccacgagggcgacaagaaagtgatcgtggaacggttcaaggccaaagtgaccatcgactgggacagaagcaccaacaccgcctacctgcagctgagcggactgacatctggcgataccgccgtgtactactgtgccaagggcagcaagcaccggctgagagattacgccctgtacgacgatgacggcgccctgaattgggccgtcgatgtggactacctgagcaacctggaattctggggccagggaacagccgtgacagtgtctagtgcttccacaaagggccctagcgtgttccctctggctcctagcagcaagtctacaagcggaggaacagctgccctgggctgcctggtggaagattactttcctgagcctgtgaccgtgtcctggaacagcggtgctctgacttctggcgtgcacacctttccagccgtgctgcaaagcagcggcctgtactctctgagcagcgtggtcacagtgccaagctctagcctgggcacccagacctacatctgcaatgtgaaccacaagcctagcaacaccaaggtggacgacagagtggaacccaagagctgcgacaagacccacacctgtcctccatgtcctgctccagaactgctggccggaccttccgtgttcctgtttcctccaaagcctaaggacaccctgatgatcagcagaacccctgaagtgacctgcgtggtggtggatgtgtctcacgaggaccccgaagtgaagttcaattggtacgtggacggcgtggaagtgcacaatgccaagaccaagcctagagaggaacagtacaacagcacctacagagtggtgtccgtgctgaccgtgctgcaccaggattggctgaacggcaaagagtacaagtgcaaggtgtccaacaaggccctgcctctgcctgaggaaaagaccatcagcaaggccaagggccagcctagggaaccccaggtttacaccctgcctccatgccgcgaggaaatgaccaagaaccaggtgtccctgtggtgcctcgtgaagggcttctacccttccgatatcgccgtggaatgggagagcaatggccagcctgagaacaactacaagacaacccctcctgtgctggacagcgacggctcattcttcctgtacagcaagctgaccgtggacaagtccagatggcagcagggcaacgtgttcagctgtagcgtgctgcacgaagccctgcacagccactacacccagaagtccctgtctctgagccccggcaagtgataa

SEQ ID NO: 375 - DNA, 1476 bp, synthetic construct
  source 1..1476: mol_type = other DNA
atggattggatctggcgcatcctgtttctcgtgggagctgccacaggcgcccactctcaagttcacctgacacagtctggccccgaagtgcggaagcctggcacaagcgtgaaggtgtcctgtaaagcccctggcaacaccctgaaaacctacgacctgcactgggtccgatctgtgcctggacaaggactgcagtggatgggctggattagccacgagggcgacaagaaagtgatcgtggaacggttcaaggccaaagtgaccatcgactgggacagaagcaccaacaccgcctacctgcagctgagcggactgacatctggcgataccgccgtgtactactgtgccaagggcagcaagcaccggctgagagattacgccctgtacgacgatgacggcgccctgaattgggccgtcgatgtggactacctgagcaacctggaattctggggccagggaacagccgtgacagtgtctagtgcttccacaaagggccctagcgtgttccctctggctcctagcagcaagtctacaagcggaggaacagctgccctgggctgcctggtggaagattactttcctgagcctgtgaccgtgtcctggaacagcggtgctctgacttctggcgtgcacacctttccagccgtgctgcaaagcagcggcctgtactctctgagcagcgtggtcacagtgccaagctctagcctgggcacccagacctacatctgcaatgtgaaccacaagcctagcaacaccaaggtggacgacagagtggaacccaagagctgcgacaagacccacacctgtcctccatgtcctgctccagaactgctggccggaccttccgtgttcctgtttcctccaaagcctaaggacaccctgatgatcagcagaacccctgaagtgacctgcgtggtggtggatgtgtctcacgaggaccctgaagtgaagttcaattggtacgtggacggcgtggaagtgcacaacgccaagaccaagcctagagaggaacagtacaacagcacctacagagtggtgtccgtgctgaccgtgctgcaccaggattggctgaacggcaaagagtacaagtgcaaggtgtccaacaaggccctgcctgcccctgaggaaaagaccatcagcaaggccaagggccagcctagggaaccccaggtttacaccctgcctccatgccgcgaggaaatgaccaagaaccaggtgtccctgtggtgcctcgtgaagggcttctacccttccgatatcgccgtggaatgggagagcaatggccagcctgagaacaactacaagacaacccctcctgtgctggacagcgacggctcattcttcctgtacagcaagctgaccgtggacaagtccagatggcagcagggcaacgtgttcagctgtagcgtgctgcacgaagccctgcacagccactacacccagaagtccctgtctctgagccccggcaagtgataa

SEQ ID NO: 376 - DNA, 1476 bp, synthetic construct
  source 1..1476: mol_type = other DNA
atggattggatctggcgcatcctgtttctcgtgggagctgccacaggcgcccactctcaagttcacctgacacagtctggccccgaagtgcggaagcctggcacaagcgtgaaggtgtcctgtaaagcccctggcaacaccctgaaaacctacgacctgcactgggtccgatctgtgcctggacaaggactgcagtggatgggctggattagccacgagggcgacaagaaagtgatcgtggaacggttcaaggccaaagtgaccatcgactgggacagaagcaccaacaccgcctacctgcagctgagcggactgacatctggcgataccgccgtgtactactgtgccaagggcagcaagcaccggctgagagattacgccctgtacgacgatgacggcgccctgaattgggccgtcgatgtggactacctgagcaacctggaattctggggccagggaacagccgtgacagtgtctagtgcttccacaaagggccctagcgtgttccctctggctcctagcagcaagtctacaagcggaggaacagctgccctgggctgcctggtggaagattactttcctgagcctgtgaccgtgtcctggaacagcggtgctctgacttctggcgtgcacacctttccagccgtgctgcaaagcagcggcctgtactctctgagcagcgtggtcacagtgccaagctctagcctgggcacccagacctacatctgcaatgtgaaccacaagcctagcaacaccaaggtggacgacagagtggaacccaagagctgcgacaagacccacacctgtcctccatgtcctgctccagaactgctggccggaccttccgtgttcctgtttcctccaaagcctaaggacaccctgatgatcagcagaacccctgaagtgacctgcgtggtggtggatgtgtctcacgaggaccctgaagtgaagttcaattggtacgtggacggcgtggaagtgcacaacgccaagaccaagcctagagaggaacagtacaacagcacctacagagtggtgtccgtgctgaccgtgctgcaccaggattggctgaacggcaaagagtacaagtgcaaggtgtccaacaaggccctgcctgcccctatcgaaaagaccatcagcaaggccaagggccagcctagggaaccccaggtttacaccctgcctccatgccgcgaggaaatgaccaagaaccaggtgtccctgtggtgcctcgtgaagggcttctacccttccgatatcgccgtggaatgggagagcaatggccagcctgagaacaactacaagacaacccctcctgtgctggacagcgacggctcattcttcctgtacagcaagctgaccgtggacaagtccagatggcagcagggcaacgtgttcagctgtagcgtgctgcacgaagccctgcacagccactacacccagaagtccctgtctctgagccccggcaagtgataa

SEQ ID NO: 377 - DNA, 1476 bp, synthetic construct
  source 1..1476: mol_type = other DNA
atggattggatctggcgcatcctgtttctcgtgggagctgccacaggcgcccactctcaagttcacctgacacagtctggccccgaagtgcggaagcctggcacaagcgtgaaggtgtcctgtaaagcccctggcaacaccctgaaaacctacgacctgcactgggtccgatctgtgcctggacaaggactgcagtggatgggctggattagccacgagggcgacaagaaagtgatcgtggaacggttcaaggccaaagtgaccatcgactgggacagaagcaccaacaccgcctacctgcagctgagcggactgacatctggcgataccgccgtgtactactgtgccaagggcagcaagcaccggctgagagattacgccctgtacgacgatgacggcgccctgaattgggccgtcgatgtggactacctgagcaacctggaattctggggccagggaacagccgtgacagtgtctagtgcttccacaaagggccctagcgtgttccctctggctcctagcagcaagtctacaagcggaggaacagctgccctgggctgcctggtggaagattactttcctgagcctgtgaccgtgtcctggaacagcggtgctctgacttctggcgtgcacacctttccagccgtgctgcaaagcagcggcctgtactctctgagcagcgtggtcacagtgccaagctctagcctgggcacccagacctacatctgcaatgtgaaccacaagcctagcaacaccaaggtggacgacagagtggaacccaagagctgcgacaagacccacacctgtcctccatgtcctgctccagaactgctgggcggaccttccgtgttcctgtttcctccaaagcctaaggacaccctgatgatcagcagaacccctgaagtgacctgcgtggtggtggatgtgtctcacgaggaccctgaagtgaagttcaattggtacgtggacggcgtggaagtgcacaacgccaagaccaagcctagagaggaacagtacaacagcacctacagagtggtgtccgtgctgaccgtgctgcaccaggattggctgaacggcaaagagtacaagtgcaaggtgtccaacaaggccctgcctgcccctgaggaaaagaccatcagcaaggccaagggccagcctagggaaccccaggtttacaccctgcctccatgccgcgaggaaatgaccaagaaccaggtgtccctgtggtgcctcgtgaagggcttctacccttccgatatcgccgtggaatgggagagcaatggccagcctgagaacaactacaagacaacccctcctgtgctggacagcgacggctcattcttcctgtacagcaagctgaccgtggacaagtccagatggcagcagggcaacgtgttcagctgtagcgtgctgcacgaagccctgcacagccactacacccagaagtccctgtctctgagccccggcaagtgataa

SEQ ID NO: 378 - DNA, 1476 bp, synthetic construct
  source 1..1476: mol_type = other DNA
atggattggatctggcgcatcctgtttctcgtgggagctgccacaggcgcccactctcaagttcacctgacacagtctggccccgaagtgcggaagcctggcacaagcgtgaaggtgtcctgtaaagcccctggcaacaccctgaaaacctacgacctgcactgggtccgatctgtgcctggacaaggactgcagtggatgggctggattagccacgagggcgacaagaaagtgatcgtggaacggttcaaggccaaagtgaccatcgactgggacagaagcaccaacaccgcctacctgcagctgagcggactgacatctggcgataccgccgtgtactactgtgccaagggcagcaagcaccggctgagagattacgccctgtacgacgatgacggcgccctgaattgggccgtcgatgtggactacctgagcaacctggaattctggggccagggaacagccgtgacagtgtctagtgcttccacaaagggccctagcgtgttccctctggctcctagcagcaagtctacaagcggaggaacagctgccctgggctgcctggtggaagattactttcctgagcctgtgaccgtgtcctggaacagcggtgctctgacttctggcgtgcacacctttccagccgtgctgcaaagcagcggcctgtactctctgagcagcgtggtcacagtgccaagctctagcctgggcacccagacctacatctgcaatgtgaaccacaagcctagcaacaccaaggtggacgacaaggtggaacccaagagctgcgacaagacccacacctgtcctccatgtcctgctccagaactgctcggcggaccttccgtgttcctgtttcctccaaagcctaaggacaccctgatgatcagcagaacccctgaagtgacctgcgtggtggtggatgtgtctcacgaggaccccgaagtgaagttcaattggtacgtggacggcgtggaagtgcacaacgccaagaccaagcctagagaggaacagtacaacagcacctacagagtggtgtccgtgctgacagtgctgcaccaggattggctgaacggcaaagagtacaagtgcaaggtgtccaacaaggccctgcctgctcctatcgagaaaaccatcagcaaggccaagggccagcctagggaaccccaggtttacacactgcctccaagccgcgaggaaatgaccaagaaccaggtgtccctgacctgcctcgtgaagggcttctacccttccgatatcgccgtggaatgggagagcaatggccagcctgagaacaactacaagacaacccctcctgtgctggacagcgacggctcattcttcctgtacagcaagctgactgtggataagtcccggtggcagcagggcaacgtgttcagctgttctgtgatgcacgaagccctgcacaaccactacacccagaaaagcctgtctctgagccccggcaagtgataa

SEQ ID NO: 379 - DNA, 1476 bp, synthetic construct
  source 1..1476: mol_type = other DNA
atggattggatctggcgcatcctgtttctcgtgggagctgccacaggcgcccactctcaagttcacctgacacagtctggccccgaagtgcggaagcctggcacaagcgtgaaggtgtcctgtaaagcccctggcaacaccctgaaaacctacgacctgcactgggtccgatctgtgcctggacaaggactgcagtggatgggctggattagccacgagggcgacaagaaagtgatcgtggaacggttcaaggccaaagtgaccatcgactgggacagaagcaccaacaccgcctacctgcagctgagcggactgacatctggcgataccgccgtgtactactgtgccaagggcagcaagcaccggctgagagattacgccctgtacgacgatgacggcgccctgaattgggccgtcgatgtggactacctgagcaacctggaattctggggccagggaacagccgtgacagtgtctagtgcttccacaaagggccctagcgtgttccctctggctcctagcagcaagtctacaagcggaggaacagctgccctgggctgcctggtggaagattactttcctgagcctgtgaccgtgtcctggaacagcggtgctctgacttctggcgtgcacacctttccagccgtgctgcaaagcagcggcctgtactctctgagcagcgtggtcacagtgccaagctctagcctgggcacccagacctacatctgcaatgtgaaccacaagcctagcaacaccaaggtggacgacaaggtggaacccaagagctgcgacaagacccacacctgtcctccatgtcctgctccagaactgctcggcggaccttccgtgttcctgtttcctccaaagcctaaggacaccctgatgatcagcagaacccctgaagtgacctgcgtggtggtggatgtgtctcacgaggaccccgaagtgaagttcaattggtacgtggacggcgtggaagtgcacaacgccaagaccaagcctagagaggaacagtacaacagcacctacagagtggtgtccgtgctgacagtgctgcaccaggattggctgaacggcaaagagtacaagtgcaaggtgtccaacaaggccctgcctgctcctatcgagaaaaccatcagcaaggccaagggccagcctagggaaccccaggtttacacactgcctccaagccgcgaggaaatgaccaagaaccaggtgtccctgacctgcctcgtgaagggcttctacccttccgatatcgccgtggaatgggagagcaatggccagcctgagaacaactacaagacaacccctcctgtgctggacagcgacggctcattcttcctgtacagcaagctgaccgtggacaagtccagatggcagcagggcaacgtgttcagctgtagcgtgctgcacgaagccctgcacagccactacacccagaaaagcctgtctctgagccccggcaaatgataa

SEQ ID NO: 380 - DNA, 1476 bp, synthetic construct
  source 1..1476: mol_type = other DNA
atggattggatctggcgcatcctgtttctcgtgggagctgccacaggcgcccactctcaagttcacctgacacagtctggccccgaagtgcggaagcctggcacaagcgtgaaggtgtcctgtaaagcccctggcaacaccctgaaaacctacgacctgcactgggtccgatctgtgcctggacaaggactgcagtggatgggctggattagccacgagggcgacaagaaagtgatcgtggaacggttcaaggccaaagtgaccatcgactgggacagaagcaccaacaccgcctacctgcagctgagcggactgacatctggcgataccgccgtgtactactgtgccaagggcagcaagcaccggctgagagattacgccctgtacgacgatgacggcgccctgaattgggccgtcgatgtggactacctgagcaacctggaattctggggccagggaacagccgtgacagtgtctagtgcttccacaaagggccctagcgtgttccctctggctcctagcagcaagtctacaagcggaggaacagctgccctgggctgcctggtggaagattactttcctgagcctgtgaccgtgtcctggaacagcggtgctctgacttctggcgtgcacacctttccagccgtgctgcaaagcagcggcctgtactctctgagcagcgtggtcacagtgccaagctctagcctgggcacccagacctacatctgcaatgtgaaccacaagcctagcaacaccaaggtggacgacaaggtggaacccaagagctgcgacaagacccacacctgtcctccatgtcctgctccagaactgctggccggaccttccgtgttcctgtttcctccaaagcctaaggacaccctgatgatcagcagaacccctgaagtgacctgcgtggtggtggatgtgtctcacgaggaccccgaagtgaagttcaattggtacgtggacggcgtggaagtgcacaatgccaagaccaagcctagagaggaacagtacaacagcacctacagagtggtgtccgtgctgaccgtgctgcaccaggattggctgaacggcaaagagtacaagtgcaaggtgtccaacaaggccctgcctctgcctgaggaaaagaccatcagcaaggccaagggccagcctagggaaccccaggtttacacactgcctccaagccgcgaggaaatgaccaagaaccaggtgtccctgacctgcctcgtgaagggcttctacccttccgatatcgccgtggaatgggagagcaatggccagcctgagaacaactacaagacaacccctcctgtgctggacagcgacggctcattcttcctgtacagcaagctgaccgtggacaagtccagatggcagcagggcaacgtgttcagctgtagcgtgctgcacgaagccctgcacagccactacacccagaaaagcctgtctctgagccccggcaaatgataa

SEQ ID NO: 381 - DNA, 1476 bp, synthetic construct
  source 1..1476: mol_type = other DNA
atggattggatctggcgcatcctgtttctcgtgggagctgccacaggcgcccactctcaagttcacctgacacagtctggccccgaagtgcggaagcctggcacaagcgtgaaggtgtcctgtaaagcccctggcaacaccctgaaaacctacgacctgcactgggtccgatctgtgcctggacaaggactgcagtggatgggctggattagccacgagggcgacaagaaagtgatcgtggaacggttcaaggccaaagtgaccatcgactgggacagaagcaccaacaccgcctacctgcagctgagcggactgacatctggcgataccgccgtgtactactgtgccaagggcagcaagcaccggctgagagattacgccctgtacgacgatgacggcgccctgaattgggccgtcgatgtggactacctgagcaacctggaattctggggccagggaacagccgtgacagtgtctagtgcttccacaaagggccctagcgtgttccctctggctcctagcagcaagtctacaagcggaggaacagctgccctgggctgcctggtggaagattactttcctgagcctgtgaccgtgtcctggaacagcggtgctctgacttctggcgtgcacacctttccagccgtgctgcaaagcagcggcctgtactctctgagcagcgtggtcacagtgccaagctctagcctgggcacccagacctacatctgcaatgtgaaccacaagcctagcaacaccaaggtggacgacaaggtggaacccaagagctgcgacaagacccacacctgtcctccatgtcctgctccagaactgctggccggaccttccgtgttcctgtttcctccaaagcctaaggacaccctgatgatcagcagaacccctgaagtgacctgcgtggtggtggatgtgtctcacgaggaccctgaagtgaagttcaattggtacgtggacggcgtggaagtgcacaacgccaagaccaagcctagagaggaacagtacaacagcacctacagagtggtgtccgtgctgaccgtgctgcaccaggattggctgaacggcaaagagtacaagtgcaaggtgtccaacaaggccctgcctgcccctgaggaaaagaccatcagcaaggccaagggccagcctagggaaccccaggtttacacactgcctccaagccgcgaggaaatgaccaagaaccaggtgtccctgacctgcctcgtgaagggcttctacccttccgatatcgccgtggaatgggagagcaatggccagcctgagaacaactacaagacaacccctcctgtgctggacagcgacggctcattcttcctgtacagcaagctgaccgtggacaagtccagatggcagcagggcaacgtgttcagctgtagcgtgctgcacgaagccctgcacagccactacacccagaaaagcctgtctctgagccccggcaaatgataa

SEQ ID NO: 382 - DNA, 1476 bp, synthetic construct
  source 1..1476: mol_type = other DNA
atggattggatctggcgcatcctgtttctcgtgggagctgccacaggcgcccactctcaagttcacctgacacagtctggccccgaagtgcggaagcctggcacaagcgtgaaggtgtcctgtaaagcccctggcaacaccctgaaaacctacgacctgcactgggtccgatctgtgcctggacaaggactgcagtggatgggctggattagccacgagggcgacaagaaagtgatcgtggaacggttcaaggccaaagtgaccatcgactgggacagaagcaccaacaccgcctacctgcagctgagcggactgacatctggcgataccgccgtgtactactgtgccaagggcagcaagcaccggctgagagattacgccctgtacgacgatgacggcgccctgaattgggccgtcgatgtggactacctgagcaacctggaattctggggccagggaacagccgtgacagtgtctagtgcttccacaaagggccctagcgtgttccctctggctcctagcagcaagtctacaagcggaggaacagctgccctgggctgcctggtggaagattactttcctgagcctgtgaccgtgtcctggaacagcggtgctctgacttctggcgtgcacacctttccagccgtgctgcaaagcagcggcctgtactctctgagcagcgtggtcacagtgccaagctctagcctgggcacccagacctacatctgcaatgtgaaccacaagcctagcaacaccaaggtggacgacaaggtggaacccaagagctgcgacaagacccacacctgtcctccatgtcctgctccagaactgctggccggaccttccgtgttcctgtttcctccaaagcctaaggacaccctgatgatcagcagaacccctgaagtgacctgcgtggtggtggatgtgtctcacgaggaccctgaagtgaagttcaattggtacgtggacggcgtggaagtgcacaacgccaagaccaagcctagagaggaacagtacaacagcacctacagagtggtgtccgtgctgaccgtgctgcaccaggattggctgaacggcaaagagtacaagtgcaaggtgtccaacaaggccctgcctgcccctatcgaaaagaccatcagcaaggccaagggccagcctagggaaccccaggtttacacactgcctccaagccgcgaggaaatgaccaagaaccaggtgtccctgacctgcctcgtgaagggcttctacccttccgatatcgccgtggaatgggagagcaatggccagcctgagaacaactacaagacaacccctcctgtgctggacagcgacggctcattcttcctgtacagcaagctgaccgtggacaagtccagatggcagcagggcaacgtgttcagctgtagcgtgctgcacgaagccctgcacagccactacacccagaaaagcctgtctctgagccccggcaaatgataa

SEQ ID NO: 383 - DNA, 1476 bp, synthetic construct
  source 1..1476: mol_type = other DNA
atggattggatctggcgcatcctgtttctcgtgggagctgccacaggcgcccactctcaagttcacctgacacagtctggccccgaagtgcggaagcctggcacaagcgtgaaggtgtcctgtaaagcccctggcaacaccctgaaaacctacgacctgcactgggtccgatctgtgcctggacaaggactgcagtggatgggctggattagccacgagggcgacaagaaagtgatcgtggaacggttcaaggccaaagtgaccatcgactgggacagaagcaccaacaccgcctacctgcagctgagcggactgacatctggcgataccgccgtgtactactgtgccaagggcagcaagcaccggctgagagattacgccctgtacgacgatgacggcgccctgaattgggccgtcgatgtggactacctgagcaacctggaattctggggccagggaacagccgtgacagtgtctagtgcttccacaaagggccctagcgtgttccctctggctcctagcagcaagtctacaagcggaggaacagctgccctgggctgcctggtggaagattactttcctgagcctgtgaccgtgtcctggaacagcggtgctctgacttctggcgtgcacacctttccagccgtgctgcaaagcagcggcctgtactctctgagcagcgtggtcacagtgccaagctctagcctgggcacccagacctacatctgcaatgtgaaccacaagcctagcaacaccaaggtggacgacaaggtggaacccaagagctgcgacaagacccacacctgtcctccatgtcctgctccagaactgctgggcggaccttccgtgttcctgtttcctccaaagcctaaggacaccctgatgatcagcagaacccctgaagtgacctgcgtggtggtggatgtgtctcacgaggaccctgaagtgaagttcaattggtacgtggacggcgtggaagtgcacaacgccaagaccaagcctagagaggaacagtacaacagcacctacagagtggtgtccgtgctgaccgtgctgcaccaggattggctgaacggcaaagagtacaagtgcaaggtgtccaacaaggccctgcctgcccctgaggaaaagaccatcagcaaggccaagggccagcctagggaaccccaggtttacacactgcctccaagccgcgaggaaatgaccaagaaccaggtgtccctgacctgcctcgtgaagggcttctacccttccgatatcgccgtggaatgggagagcaatggccagcctgagaacaactacaagacaacccctcctgtgctggacagcgacggctcattcttcctgtacagcaagctgaccgtggacaagtccagatggcagcagggcaacgtgttcagctgtagcgtgctgcacgaagccctgcacagccactacacccagaaaagcctgtctctgagccccggcaaatgataa

SEQ ID NO: 384 - DNA, 1476 bp, synthetic construct
  source 1..1476: mol_type = other DNA
atggattggatctggcgcatcctgtttctcgtgggagctgccacaggcgcccactctcaagttcacctgacacagtctggccccgaagtgcggaagcctggcacaagcgtgaaggtgtcctgtaaagcccctggcaacaccctgaaaacctacgacctgcactgggtccgatctgtgcctggacaaggactgcagtggatgggctggattagccacgagggcgacaagaaagtgatcgtggaacggttcaaggccaaagtgaccatcgactgggacagaagcaccaacaccgcctacctgcagctgagcggactgacatctggcgataccgccgtgtactactgtgccaagggcagcaagcaccggctgagagattacgccctgtacgacgatgacggcgccctgaattgggccgtcgatgtggactacctgagcaacctggaattctggggccagggaacagccgtgacagtgtctagtgcttccacaaagggccctagcgtgttccctctggctcctagcagcaagtctacaagcggaggaacagctgccctgggctgcctggtggaagattactttcctgagcctgtgaccgtgtcctggaacagcggtgctctgacttctggcgtgcacacctttccagccgtgctgcaaagcagcggcctgtactctctgagcagcgtggtcacagtgccaagctctagcctgggcacccagacctacatctgcaatgtgaaccacaagcctagcaacaccaaggtggacgacaaggtggaacccaagagctgcgacaagacccacacctgtcctccatgtcctgctccagaactgctcggcggaccttccgtgttcctgtttcctccaaagcctaaggacaccctgatgatcagcagaacccctgaagtgacctgcgtggtggtggatgtgtctcacgaggaccccgaagtgaagttcaattggtacgtggacggcgtggaagtgcacaacgccaagaccaagcctagagaggaacagtacaacagcacctacagagtggtgtccgtgctgacagtgctgcaccaggattggctgaacggcaaagagtacaagtgcaaggtgtccaacaaggccctgcctgctcctatcgagaaaaccatcagcaaggccaagggccagcctagggaaccccaagtctgtacactgcctcctagccgcgaggaaatgaccaagaaccaggtgtccctgagctgcgccgtgaagggcttttacccttccgatatcgccgtggaatgggagagcaatggccagcctgagaacaactacaagacaacccctcctgtgctggacagcgacggctcattcttcctggtgtccaagctgacagtggacaagagcagatggcagcagggcaacgtgttcagctgctctgtgctgcacgaagccctgcacagccactacacccagaagtccctgtctctgagccccggcaagtgataa

SEQ ID NO: 385 - DNA, 1476 bp, synthetic construct
  source 1..1476: mol_type = other DNA
atggattggatctggcgcatcctgtttctcgtgggagctgccacaggcgcccactctcaagttcacctgacacagtctggccccgaagtgcggaagcctggcacaagcgtgaaggtgtcctgtaaagcccctggcaacaccctgaaaacctacgacctgcactgggtccgatctgtgcctggacaaggactgcagtggatgggctggattagccacgagggcgacaagaaagtgatcgtggaacggttcaaggccaaagtgaccatcgactgggacagaagcaccaacaccgcctacctgcagctgagcggactgacatctggcgataccgccgtgtactactgtgccaagggcagcaagcaccggctgagagattacgccctgtacgacgatgacggcgccctgaattgggccgtcgatgtggactacctgagcaacctggaattctggggccagggaacagccgtgacagtgtctagtgcttccacaaagggccctagcgtgttccctctggctcctagcagcaagtctacaagcggaggaacagctgccctgggctgcctggtggaagattactttcctgagcctgtgaccgtgtcctggaacagcggtgctctgacttctggcgtgcacacctttccagccgtgctgcaaagcagcggcctgtactctctgagcagcgtggtcacagtgccaagctctagcctgggcacccagacctacatctgcaatgtgaaccacaagcctagcaacaccaaggtggacgacaaggtggaacccaagagctgcgacaagacccacacctgtcctccatgtcctgctccagaactgctggccggaccttccgtgttcctgtttcctccaaagcctaaggacaccctgatgatcagcagaacccctgaagtgacctgcgtggtggtggatgtgtctcacgaggaccccgaagtgaagttcaattggtacgtggacggcgtggaagtgcacaatgccaagaccaagcctagagaggaacagtacaacagcacctacagagtggtgtccgtgctgaccgtgctgcaccaggattggctgaacggcaaagagtacaagtgcaaggtgtccaacaaggccctgcctctgcctgaggaaaagaccatcagcaaggccaagggccagcctagggaaccccaagtctgtacactgcctcctagccgcgaggaaatgaccaagaaccaggtgtccctgagctgcgccgtgaagggcttttacccttccgatatcgccgtggaatgggagagcaatggccagcctgagaacaactacaagacaacccctcctgtgctggacagcgacggctcattcttcctggtgtccaagctgacagtggacaagagcagatggcagcagggcaacgtgttcagctgctctgtgctgcacgaagccctgcacagccactacacccagaagtccctgtctctgagccccggcaagtgataa

SEQ ID NO: 386 - DNA, 1476 bp, synthetic construct
  source 1..1476: mol_type = other DNA
atggattggatctggcgcatcctgtttctcgtgggagctgccacaggcgcccactctcaagttcacctgacacagtctggccccgaagtgcggaagcctggcacaagcgtgaaggtgtcctgtaaagcccctggcaacaccctgaaaacctacgacctgcactgggtccgatctgtgcctggacaaggactgcagtggatgggctggattagccacgagggcgacaagaaagtgatcgtggaacggttcaaggccaaagtgaccatcgactgggacagaagcaccaacaccgcctacctgcagctgagcggactgacatctggcgataccgccgtgtactactgtgccaagggcagcaagcaccggctgagagattacgccctgtacgacgatgacggcgccctgaattgggccgtcgatgtggactacctgagcaacctggaattctggggccagggaacagccgtgacagtgtctagtgcttccacaaagggccctagcgtgttccctctggctcctagcagcaagtctacaagcggaggaacagctgccctgggctgcctggtggaagattactttcctgagcctgtgaccgtgtcctggaacagcggtgctctgacttctggcgtgcacacctttccagccgtgctgcaaagcagcggcctgtactctctgagcagcgtggtcacagtgccaagctctagcctgggcacccagacctacatctgcaatgtgaaccacaagcctagcaacaccaaggtggacgacaaggtggaacccaagagctgcgacaagacccacacctgtcctccatgtcctgctccagaactgctggccggaccttccgtgttcctgtttcctccaaagcctaaggacaccctgatgatcagcagaacccctgaagtgacctgcgtggtggtggatgtgtctcacgaggaccctgaagtgaagttcaattggtacgtggacggcgtggaagtgcacaacgccaagaccaagcctagagaggaacagtacaacagcacctacagagtggtgtccgtgctgaccgtgctgcaccaggattggctgaacggcaaagagtacaagtgcaaggtgtccaacaaggccctgcctgcccctgaggaaaagaccatcagcaaggccaagggccagcctagggaaccccaagtctgtacactgcctcctagccgcgaggaaatgaccaagaaccaggtgtccctgagctgcgccgtgaagggcttttacccttccgatatcgccgtggaatgggagagcaatggccagcctgagaacaactacaagacaacccctcctgtgctggacagcgacggctcattcttcctggtgtccaagctgacagtggacaagagcagatggcagcagggcaacgtgttcagctgctctgtgctgcacgaagccctgcacagccactacacccagaagtccctgtctctgagccccggcaagtgataa

SEQ ID NO: 387 - DNA, 1476 bp, synthetic construct
  source 1..1476: mol_type = other DNA
atggattggatctggcgcatcctgtttctcgtgggagctgccacaggcgcccactctcaagttcacctgacacagtctggccccgaagtgcggaagcctggcacaagcgtgaaggtgtcctgtaaagcccctggcaacaccctgaaaacctacgacctgcactgggtccgatctgtgcctggacaaggactgcagtggatgggctggattagccacgagggcgacaagaaagtgatcgtggaacggttcaaggccaaagtgaccatcgactgggacagaagcaccaacaccgcctacctgcagctgagcggactgacatctggcgataccgccgtgtactactgtgccaagggcagcaagcaccggctgagagattacgccctgtacgacgatgacggcgccctgaattgggccgtcgatgtggactacctgagcaacctggaattctggggccagggaacagccgtgacagtgtctagtgcttccacaaagggccctagcgtgttccctctggctcctagcagcaagtctacaagcggaggaacagctgccctgggctgcctggtggaagattactttcctgagcctgtgaccgtgtcctggaacagcggtgctctgacttctggcgtgcacacctttccagccgtgctgcaaagcagcggcctgtactctctgagcagcgtggtcacagtgccaagctctagcctgggcacccagacctacatctgcaatgtgaaccacaagcctagcaacaccaaggtggacgacaaggtggaacccaagagctgcgacaagacccacacctgtcctccatgtcctgctccagaactgctggccggaccttccgtgttcctgtttcctccaaagcctaaggacaccctgatgatcagcagaacccctgaagtgacctgcgtggtggtggatgtgtctcacgaggaccctgaagtgaagttcaattggtacgtggacggcgtggaagtgcacaacgccaagaccaagcctagagaggaacagtacaacagcacctacagagtggtgtccgtgctgaccgtgctgcaccaggattggctgaacggcaaagagtacaagtgcaaggtgtccaacaaggccctgcctgcccctatcgaaaagaccatcagcaaggccaagggccagcctagggaaccccaagtctgtacactgcctcctagccgcgaggaaatgaccaagaaccaggtgtccctgagctgcgccgtgaagggcttttacccttccgatatcgccgtggaatgggagagcaatggccagcctgagaacaactacaagacaacccctcctgtgctggacagcgacggctcattcttcctggtgtccaagctgacagtggacaagagcagatggcagcagggcaacgtgttcagctgctctgtgctgcacgaagccctgcacagccactacacccagaagtccctgtctctgagccccggcaagtgataa

SEQ ID NO: 388 - DNA, 1476 bp, synthetic construct
  source 1..1476: mol_type = other DNA
atggattggatctggcgcatcctgtttctcgtgggagctgccacaggcgcccactctcaagttcacctgacacagtctggccccgaagtgcggaagcctggcacaagcgtgaaggtgtcctgtaaagcccctggcaacaccctgaaaacctacgacctgcactgggtccgatctgtgcctggacaaggactgcagtggatgggctggattagccacgagggcgacaagaaagtgatcgtggaacggttcaaggccaaagtgaccatcgactgggacagaagcaccaacaccgcctacctgcagctgagcggactgacatctggcgataccgccgtgtactactgtgccaagggcagcaagcaccggctgagagattacgccctgtacgacgatgacggcgccctgaattgggccgtcgatgtggactacctgagcaacctggaattctggggccagggaacagccgtgacagtgtctagtgcttccacaaagggccctagcgtgttccctctggctcctagcagcaagtctacaagcggaggaacagctgccctgggctgcctggtggaagattactttcctgagcctgtgaccgtgtcctggaacagcggtgctctgacttctggcgtgcacacctttccagccgtgctgcaaagcagcggcctgtactctctgagcagcgtggtcacagtgccaagctctagcctgggcacccagacctacatctgcaatgtgaaccacaagcctagcaacaccaaggtggacgacaaggtggaacccaagagctgcgacaagacccacacctgtcctccatgtcctgctccagaactgctgggcggaccttccgtgttcctgtttcctccaaagcctaaggacaccctgatgatcagcagaacccctgaagtgacctgcgtggtggtggatgtgtctcacgaggaccctgaagtgaagttcaattggtacgtggacggcgtggaagtgcacaacgccaagaccaagcctagagaggaacagtacaacagcacctacagagtggtgtccgtgctgaccgtgctgcaccaggattggctgaacggcaaagagtacaagtgcaaggtgtccaacaaggccctgcctgcccctgaggaaaagaccatcagcaaggccaagggccagcctagggaaccccaagtctgtacactgcctcctagccgcgaggaaatgaccaagaaccaggtgtccctgagctgcgccgtgaagggcttttacccttccgatatcgccgtggaatgggagagcaatggccagcctgagaacaactacaagacaacccctcctgtgctggacagcgacggctcattcttcctggtgtccaagctgacagtggacaagagcagatggcagcagggcaacgtgttcagctgctctgtgctgcacgaagccctgcacagccactacacccagaagtccctgtctctgagccccggcaagtgataa

SEQ ID NO: 389 - DNA, 1476 bp, synthetic construct
  source 1..1476: mol_type = other DNA
atggattggatctggcgcatcctgtttctcgtgggagctgccacaggcgcccactctcaagttcacctgacacagtctggccccgaagtgcggaagcctggcacaagcgtgaaggtgtcctgtaaagcccctggcaacaccctgaaaacctacgacctgcactgggtccgatctgtgcctggacaaggactgcagtggatgggctggattagccacgagggcgacaagaaagtgatcgtggaacggttcaaggccaaagtgaccatcgactgggacagaagcaccaacaccgcctacctgcagctgagcggactgacatctggcgataccgccgtgtactactgtgccaagggcagcaagcaccggctgagagattacgccctgtacgacgatgacggcgccctgaattgggccgtcgatgtggactacctgagcaacctggaattctggggccagggaacagccgtgacagtgtctagtgcttccacaaagggccctagcgtgttccctctggctcctagcagcaagtctacaagcggaggaacagctgccctgggctgcctggtggaagattactttcctgagcctgtgaccgtgtcctggaacagcggtgctctgacttctggcgtgcacacctttccagccgtgctgcaaagcagcggcctgtactctctgagcagcgtggtcacagtgccaagctctagcctgggcacccagacctacatctgcaatgtgaaccacaagcctagcaacaccaaggtggacgacaaggtggaacccaagagctgcgacaagacccacacctgtcctccatgtcctgctccagaactgctcggcggaccttccgtgttcctgtttcctccaaagcctaaggacaccctgatgatcagcagaacccctgaagtgacctgcgtggtggtggatgtgtctcacgaggaccccgaagtgaagttcaattggtacgtggacggcgtggaagtgcacaacgccaagaccaagcctagagaggaacagtacaacagcacctacagagtggtgtccgtgctgacagtgctgcaccaggattggctgaacggcaaagagtacaagtgcaaggtgtccaacaaggccctgcctgctcctatcgagaaaaccatcagcaaggccaagggccagcctagggaaccccaggtttacaccctgcctccatgccgcgaggaaatgaccaagaaccaggtgtccctgtggtgcctcgtgaagggcttctacccttccgatatcgccgtggaatgggagagcaatggccagcctgagaacaactacaagacaacccctcctgtgctggacagcgacggctcattcttcctgtacagcaagctgaccgtggacaagtccagatggcagcagggcaacgtgttcagctgtagcgtgctgcacgaagccctgcacagccactacacccagaagtccctgtctctgagccccggcaagtgataa

SEQ ID NO: 390 - DNA, 1476 bp, synthetic construct
  source 1..1476: mol_type = other DNA
atggattggatctggcgcatcctgtttctcgtgggagctgccacaggcgcccactctcaagttcacctgacacagtctggccccgaagtgcggaagcctggcacaagcgtgaaggtgtcctgtaaagcccctggcaacaccctgaaaacctacgacctgcactgggtccgatctgtgcctggacaaggactgcagtggatgggctggattagccacgagggcgacaagaaagtgatcgtggaacggttcaaggccaaagtgaccatcgactgggacagaagcaccaacaccgcctacctgcagctgagcggactgacatctggcgataccgccgtgtactactgtgccaagggcagcaagcaccggctgagagattacgccctgtacgacgatgacggcgccctgaattgggccgtcgatgtggactacctgagcaacctggaattctggggccagggaacagccgtgacagtgtctagtgcttccacaaagggccctagcgtgttccctctggctcctagcagcaagtctacaagcggaggaacagctgccctgggctgcctggtggaagattactttcctgagcctgtgaccgtgtcctggaacagcggtgctctgacttctggcgtgcacacctttccagccgtgctgcaaagcagcggcctgtactctctgagcagcgtggtcacagtgccaagctctagcctgggcacccagacctacatctgcaatgtgaaccacaagcctagcaacaccaaggtggacgacaaggtggaacccaagagctgcgacaagacccacacctgtcctccatgtcctgctccagaactgctggccggaccttccgtgttcctgtttcctccaaagcctaaggacaccctgatgatcagcagaacccctgaagtgacctgcgtggtggtggatgtgtctcacgaggaccccgaagtgaagttcaattggtacgtggacggcgtggaagtgcacaatgccaagaccaagcctagagaggaacagtacaacagcacctacagagtggtgtccgtgctgaccgtgctgcaccaggattggctgaacggcaaagagtacaagtgcaaggtgtccaacaaggccctgcctctgcctgaggaaaagaccatcagcaaggccaagggccagcctagggaaccccaggtttacaccctgcctccatgccgcgaggaaatgaccaagaaccaggtgtccctgtggtgcctcgtgaagggcttctacccttccgatatcgccgtggaatgggagagcaatggccagcctgagaacaactacaagacaacccctcctgtgctggacagcgacggctcattcttcctgtacagcaagctgaccgtggacaagtccagatggcagcagggcaacgtgttcagctgtagcgtgctgcacgaagccctgcacagccactacacccagaagtccctgtctctgagccccggcaagtgataa

SEQ ID NO: 391 - DNA, 1476 bp, synthetic construct
  source 1..1476: mol_type = other DNA
atggattggatctggcgcatcctgtttctcgtgggagctgccacaggcgcccactctcaagttcacctgacacagtctggccccgaagtgcggaagcctggcacaagcgtgaaggtgtcctgtaaagcccctggcaacaccctgaaaacctacgacctgcactgggtccgatctgtgcctggacaaggactgcagtggatgggctggattagccacgagggcgacaagaaagtgatcgtggaacggttcaaggccaaagtgaccatcgactgggacagaagcaccaacaccgcctacctgcagctgagcggactgacatctggcgataccgccgtgtactactgtgccaagggcagcaagcaccggctgagagattacgccctgtacgacgatgacggcgccctgaattgggccgtcgatgtggactacctgagcaacctggaattctggggccagggaacagccgtgacagtgtctagtgcttccacaaagggccctagcgtgttccctctggctcctagcagcaagtctacaagcggaggaacagctgccctgggctgcctggtggaagattactttcctgagcctgtgaccgtgtcctggaacagcggtgctctgacttctggcgtgcacacctttccagccgtgctgcaaagcagcggcctgtactctctgagcagcgtggtcacagtgccaagctctagcctgggcacccagacctacatctgcaatgtgaaccacaagcctagcaacaccaaggtggacgacaaggtggaacccaagagctgcgacaagacccacacctgtcctccatgtcctgctccagaactgctggccggaccttccgtgttcctgtttcctccaaagcctaaggacaccctgatgatcagcagaacccctgaagtgacctgcgtggtggtggatgtgtctcacgaggaccctgaagtgaagttcaattggtacgtggacggcgtggaagtgcacaacgccaagaccaagcctagagaggaacagtacaacagcacctacagagtggtgtccgtgctgaccgtgctgcaccaggattggctgaacggcaaagagtacaagtgcaaggtgtccaacaaggccctgcctgcccctgaggaaaagaccatcagcaaggccaagggccagcctagggaaccccaggtttacaccctgcctccatgccgcgaggaaatgaccaagaaccaggtgtccctgtggtgcctcgtgaagggcttctacccttccgatatcgccgtggaatgggagagcaatggccagcctgagaacaactacaagacaacccctcctgtgctggacagcgacggctcattcttcctgtacagcaagctgaccgtggacaagtccagatggcagcagggcaacgtgttcagctgtagcgtgctgcacgaagccctgcacagccactacacccagaagtccctgtctctgagccccggcaagtgataa

SEQ ID NO: 392 - DNA, 1476 bp, synthetic construct
  source 1..1476: mol_type = other DNA
atggattggatctggcgcatcctgtttctcgtgggagctgccacaggcgcccactctcaagttcacctgacacagtctggccccgaagtgcggaagcctggcacaagcgtgaaggtgtcctgtaaagcccctggcaacaccctgaaaacctacgacctgcactgggtccgatctgtgcctggacaaggactgcagtggatgggctggattagccacgagggcgacaagaaagtgatcgtggaacggttcaaggccaaagtgaccatcgactgggacagaagcaccaacaccgcctacctgcagctgagcggactgacatctggcgataccgccgtgtactactgtgccaagggcagcaagcaccggctgagagattacgccctgtacgacgatgacggcgccctgaattgggccgtcgatgtggactacctgagcaacctggaattctggggccagggaacagccgtgacagtgtctagtgcttccacaaagggccctagcgtgttccctctggctcctagcagcaagtctacaagcggaggaacagctgccctgggctgcctggtggaagattactttcctgagcctgtgaccgtgtcctggaacagcggtgctctgacttctggcgtgcacacctttccagccgtgctgcaaagcagcggcctgtactctctgagcagcgtggtcacagtgccaagctctagcctgggcacccagacctacatctgcaatgtgaaccacaagcctagcaacaccaaggtggacgacaaggtggaacccaagagctgcgacaagacccacacctgtcctccatgtcctgctccagaactgctggccggaccttccgtgttcctgtttcctccaaagcctaaggacaccctgatgatcagcagaacccctgaagtgacctgcgtggtggtggatgtgtctcacgaggaccctgaagtgaagttcaattggtacgtggacggcgtggaagtgcacaacgccaagaccaagcctagagaggaacagtacaacagcacctacagagtggtgtccgtgctgaccgtgctgcaccaggattggctgaacggcaaagagtacaagtgcaaggtgtccaacaaggccctgcctgcccctatcgaaaagaccatcagcaaggccaagggccagcctagggaaccccaggtttacaccctgcctccatgccgcgaggaaatgaccaagaaccaggtgtccctgtggtgcctcgtgaagggcttctacccttccgatatcgccgtggaatgggagagcaatggccagcctgagaacaactacaagacaacccctcctgtgctggacagcgacggctcattcttcctgtacagcaagctgaccgtggacaagtccagatggcagcagggcaacgtgttcagctgtagcgtgctgcacgaagccctgcacagccactacacccagaagtccctgtctctgagccccggcaagtgataa

SEQ ID NO: 393 - DNA, 1476 bp, synthetic construct
  source 1..1476: mol_type = other DNA
atggattggatctggcgcatcctgtttctcgtgggagctgccacaggcgcccactctcaagttcacctgacacagtctggccccgaagtgcggaagcctggcacaagcgtgaaggtgtcctgtaaagcccctggcaacaccctgaaaacctacgacctgcactgggtccgatctgtgcctggacaaggactgcagtggatgggctggattagccacgagggcgacaagaaagtgatcgtggaacggttcaaggccaaagtgaccatcgactgggacagaagcaccaacaccgcctacctgcagctgagcggactgacatctggcgataccgccgtgtactactgtgccaagggcagcaagcaccggctgagagattacgccctgtacgacgatgacggcgccctgaattgggccgtcgatgtggactacctgagcaacctggaattctggggccagggaacagccgtgacagtgtctagtgcttccacaaagggccctagcgtgttccctctggctcctagcagcaagtctacaagcggaggaacagctgccctgggctgcctggtggaagattactttcctgagcctgtgaccgtgtcctggaacagcggtgctctgacttctggcgtgcacacctttccagccgtgctgcaaagcagcggcctgtactctctgagcagcgtggtcacagtgccaagctctagcctgggcacccagacctacatctgcaatgtgaaccacaagcctagcaacaccaaggtggacgacaaggtggaacccaagagctgcgacaagacccacacctgtcctccatgtcctgctccagaactgctgggcggaccttccgtgttcctgtttcctccaaagcctaaggacaccctgatgatcagcagaacccctgaagtgacctgcgtggtggtggatgtgtctcacgaggaccctgaagtgaagttcaattggtacgtggacggcgtggaagtgcacaacgccaagaccaagcctagagaggaacagtacaacagcacctacagagtggtgtccgtgctgaccgtgctgcaccaggattggctgaacggcaaagagtacaagtgcaaggtgtccaacaaggccctgcctgcccctgaggaaaagaccatcagcaaggccaagggccagcctagggaaccccaggtttacaccctgcctccatgccgcgaggaaatgaccaagaaccaggtgtccctgtggtgcctcgtgaagggcttctacccttccgatatcgccgtggaatgggagagcaatggccagcctgagaacaactacaagacaacccctcctgtgctggacagcgacggctcattcttcctgtacagcaagctgaccgtggacaagtccagatggcagcagggcaacgtgttcagctgtagcgtgctgcacgaagccctgcacagccactacacccagaagtccctgtctctgagccccggcaagtgataa

SEQ ID NO: 394 - DNA, 1476 bp, synthetic construct
  source 1..1476: mol_type = other DNA
atggattggatctggcgcatcctgtttctcgtgggagctgccacaggcgcccactctcaagttcacctgacacagtctggccccgaagtgcggaagcctggcacaagcgtgaaggtgtcctgtaaagcccctggcaacaccctgaaaacctacgacctgcactgggtccgatctgtgcctggacaaggactgcagtggatgggctggattagccacgagggcgacaagaaagtgatcgtggaacggttcaaggccaaagtgaccatcgactgggacagaagcaccaacaccgcctacctgcagctgagcggactgacatctggcgataccgccgtgtactactgtgccaagggcagcaagcaccggctgagagattacgccctgtacgacgatgacggcgccctgaattgggccgtcgatgtggactacctgagcaacctggaattctggggccagggaacagccgtgacagtgtctagtgcttccacaaagggccctagcgtgttccctctggctcctagcagcaagtctacaagcggaggaacagctgccctgggctgcctggtggaagattactttcctgagcctgtgaccgtgtcctggaacagcggtgctctgacttctggcgtgcacacctttccagccgtgctgcaaagcagcggcctgtactctctgagcagcgtggtcacagtgccaagctctagcctgggcacccagacctacatctgcaatgtgaaccacaagcctagcaacaccaaggtggacgacaaggtggaacccaagagctgcgacaagacccacacctgtcctccatgtcctgctccagaactgctcggcggaccttccgtgttcctgtttcctccaaagcctaaggacaccctgatgatcagcagaacccctgaagtgacctgcgtggtggtggatgtgtctcacgaggaccccgaagtgaagttcaattggtacgtggacggcgtggaagtgcacaacgccaagaccaagcctagagaggaacagtacaacagcacctacagagtggtgtccgtgctgacagtgctgcaccaggattggctgaacggcaaagagtacaagtgcaaggtgtccaacaaggccctgcctgctcctatcgagaaaaccatcagcaaggccaagggccagcctagggaaccccaggtttacacactgcctccaagccgcgacgaactgaccaagaaccaggtgtccctgacctgcctcgtgaagggcttctacccttccgatatcgccgtggaatgggagagcaatggccagcctgagaacaactacaagacaacccctcctgtgctggacagcgacggctcattcttcctgtacagcaagctgactgtggataagtcccggtggcagcagggcaacgtgttcagctgttctgtgatgcacgaagccctgcacaaccactacacccagaaaagcctgtctctgagccccggcaagtgataa

SEQ ID NO: 395 - DNA, 1476 bp, synthetic construct
  source 1..1476: mol_type = other DNA
atggattggatctggcgcatcctgtttctcgtgggagctgccacaggcgcccactctcaagttcacctgacacagtctggccccgaagtgcggaagcctggcacaagcgtgaaggtgtcctgtaaagcccctggcaacaccctgaaaacctacgacctgcactgggtccgatctgtgcctggacaaggactgcagtggatgggctggattagccacgagggcgacaagaaagtgatcgtggaacggttcaaggccaaagtgaccatcgactgggacagaagcaccaacaccgcctacctgcagctgagcggactgacatctggcgataccgccgtgtactactgtgccaagggcagcaagcaccggctgagagattacgccctgtacgacgatgacggcgccctgaattgggccgtcgatgtggactacctgagcaacctggaattctggggccagggaacagccgtgacagtgtctagtgcttccacaaagggccctagcgtgttccctctggctcctagcagcaagtctacaagcggaggaacagctgccctgggctgcctggtggaagattactttcctgagcctgtgaccgtgtcctggaacagcggtgctctgacttctggcgtgcacacctttccagccgtgctgcaaagcagcggcctgtactctctgagcagcgtggtcacagtgccaagctctagcctgggcacccagacctacatctgcaatgtgaaccacaagcctagcaacaccaaggtggacgacaaggtggaacccaagagctgcgacaagacccacacctgtcctccatgtcctgctccagaactgctcggcggaccttccgtgttcctgtttcctccaaagcctaaggacaccctgatgatcagcagaacccctgaagtgacctgcgtggtggtggatgtgtctcacgaggaccccgaagtgaagttcaattggtacgtggacggcgtggaagtgcacaacgccaagaccaagcctagagaggaacagtacaacagcacctacagagtggtgtccgtgctgacagtgctgcaccaggattggctgaacggcaaagagtacaagtgcaaggtgtccaacaaggccctgcctgctcctatcgagaaaaccatcagcaaggccaagggccagcctagggaaccccaggtttacacactgcctccaagccgcgacgaactgaccaagaaccaggtgtccctgacctgcctcgtgaagggcttctacccttccgatatcgccgtggaatgggagagcaatggccagcctgagaacaactacaagacaacccctcctgtgctggacagcgacggctcattcttcctgtacagcaagctgaccgtggacaagtccagatggcagcagggcaacgtgttcagctgtagcgtgctgcacgaagccctgcacagccactacacccagaaaagcctgtctctgagccccggcaaatgataa

SEQ ID NO: 396 - DNA, 1476 bp, synthetic construct
  source 1..1476: mol_type = other DNA
atggattggatctggcgcatcctgtttctcgtgggagctgccacaggcgcccactctcaagttcacctgacacagtctggccccgaagtgcggaagcctggcacaagcgtgaaggtgtcctgtaaagcccctggcaacaccctgaaaacctacgacctgcactgggtccgatctgtgcctggacaaggactgcagtggatgggctggattagccacgagggcgacaagaaagtgatcgtggaacggttcaaggccaaagtgaccatcgactgggacagaagcaccaacaccgcctacctgcagctgagcggactgacatctggcgataccgccgtgtactactgtgccaagggcagcaagcaccggctgagagattacgccctgtacgacgatgacggcgccctgaattgggccgtcgatgtggactacctgagcaacctggaattctggggccagggaacagccgtgacagtgtctagtgcttccacaaagggccctagcgtgttccctctggctcctagcagcaagtctacaagcggaggaacagctgccctgggctgcctggtggaagattactttcctgagcctgtgaccgtgtcctggaacagcggtgctctgacttctggcgtgcacacctttccagccgtgctgcaaagcagcggcctgtactctctgagcagcgtggtcacagtgccaagctctagcctgggcacccagacctacatctgcaatgtgaaccacaagcctagcaacaccaaggtggacgacaaggtggaacccaagagctgcgacaagacccacacctgtcctccatgtcctgctccagaactgctggccggaccttccgtgttcctgtttcctccaaagcctaaggacaccctgatgatcagcagaacccctgaagtgacctgcgtggtggtggatgtgtctcacgaggaccccgaagtgaagttcaattggtacgtggacggcgtggaagtgcacaatgccaagaccaagcctagagaggaacagtacaacagcacctacagagtggtgtccgtgctgaccgtgctgcaccaggattggctgaacggcaaagagtacaagtgcaaggtgtccaacaaggccctgcctctgcctgaggaaaagaccatcagcaaggccaagggccagcctagggaaccccaggtttacacactgcctccaagccgcgacgaactgaccaagaaccaggtgtccctgacctgcctcgtgaagggcttctacccttccgatatcgccgtggaatgggagagcaatggccagcctgagaacaactacaagacaacccctcctgtgctggacagcgacggctcattcttcctgtacagcaagctgaccgtggacaagtccagatggcagcagggcaacgtgttcagctgtagcgtgctgcacgaagccctgcacagccactacacccagaaaagcctgtctctgagccccggcaaatgataa

SEQ ID NO: 397 - DNA, 1476 bp, synthetic construct
  source 1..1476: mol_type = other DNA
atggattggatctggcgcatcctgtttctcgtgggagctgccacaggcgcccactctcaagttcacctgacacagtctggccccgaagtgcggaagcctggcacaagcgtgaaggtgtcctgtaaagcccctggcaacaccctgaaaacctacgacctgcactgggtccgatctgtgcctggacaaggactgcagtggatgggctggattagccacgagggcgacaagaaagtgatcgtggaacggttcaaggccaaagtgaccatcgactgggacagaagcaccaacaccgcctacctgcagctgagcggactgacatctggcgataccgccgtgtactactgtgccaagggcagcaagcaccggctgagagattacgccctgtacgacgatgacggcgccctgaattgggccgtcgatgtggactacctgagcaacctggaattctggggccagggaacagccgtgacagtgtctagtgcttccacaaagggccctagcgtgttccctctggctcctagcagcaagtctacaagcggaggaacagctgccctgggctgcctggtggaagattactttcctgagcctgtgaccgtgtcctggaacagcggtgctctgacttctggcgtgcacacctttccagccgtgctgcaaagcagcggcctgtactctctgagcagcgtggtcacagtgccaagctctagcctgggcacccagacctacatctgcaatgtgaaccacaagcctagcaacaccaaggtggacgacaaggtggaacccaagagctgcgacaagacccacacctgtcctccatgtcctgctccagaactgctggccggaccttccgtgttcctgtttcctccaaagcctaaggacaccctgatgatcagcagaacccctgaagtgacctgcgtggtggtggatgtgtctcacgaggaccctgaagtgaagttcaattggtacgtggacggcgtggaagtgcacaacgccaagaccaagcctagagaggaacagtacaacagcacctacagagtggtgtccgtgctgaccgtgctgcaccaggattggctgaacggcaaagagtacaagtgcaaggtgtccaacaaggccctgcctgcccctgaggaaaagaccatcagcaaggccaagggccagcctagggaaccccaggtttacacactgcctccaagccgcgacgaactgaccaagaaccaggtgtccctgacctgcctcgtgaagggcttctacccttccgatatcgccgtggaatgggagagcaatggccagcctgagaacaactacaagacaacccctcctgtgctggacagcgacggctcattcttcctgtacagcaagctgaccgtggacaagtccagatggcagcagggcaacgtgttcagctgtagcgtgctgcacgaagccctgcacagccactacacccagaaaagcctgtctctgagccccggcaaatgataa

SEQ ID NO: 398 - DNA, 1476 bp, synthetic construct
  source 1..1476: mol_type = other DNA
atggattggatctggcgcatcctgtttctcgtgggagctgccacaggcgcccactctcaagttcacctgacacagtctggccccgaagtgcggaagcctggcacaagcgtgaaggtgtcctgtaaagcccctggcaacaccctgaaaacctacgacctgcactgggtccgatctgtgcctggacaaggactgcagtggatgggctggattagccacgagggcgacaagaaagtgatcgtggaacggttcaaggccaaagtgaccatcgactgggacagaagcaccaacaccgcctacctgcagctgagcggactgacatctggcgataccgccgtgtactactgtgccaagggcagcaagcaccggctgagagattacgccctgtacgacgatgacggcgccctgaattgggccgtcgatgtggactacctgagcaacctggaattctggggccagggaacagccgtgacagtgtctagtgcttccacaaagggccctagcgtgttccctctggctcctagcagcaagtctacaagcggaggaacagctgccctgggctgcctggtggaagattactttcctgagcctgtgaccgtgtcctggaacagcggtgctctgacttctggcgtgcacacctttccagccgtgctgcaaagcagcggcctgtactctctgagcagcgtggtcacagtgccaagctctagcctgggcacccagacctacatctgcaatgtgaaccacaagcctagcaacaccaaggtggacgacaaggtggaacccaagagctgcgacaagacccacacctgtcctccatgtcctgctccagaactgctggccggaccttccgtgttcctgtttcctccaaagcctaaggacaccctgatgatcagcagaacccctgaagtgacctgcgtggtggtggatgtgtctcacgaggaccctgaagtgaagttcaattggtacgtggacggcgtggaagtgcacaacgccaagaccaagcctagagaggaacagtacaacagcacctacagagtggtgtccgtgctgaccgtgctgcaccaggattggctgaacggcaaagagtacaagtgcaaggtgtccaacaaggccctgcctgcccctatcgaaaagaccatcagcaaggccaagggccagcctagggaaccccaggtttacacactgcctccaagccgcgacgaactgaccaagaaccaggtgtccctgacctgcctcgtgaagggcttctacccttccgatatcgccgtggaatgggagagcaatggccagcctgagaacaactacaagacaacccctcctgtgctggacagcgacggctcattcttcctgtacagcaagctgaccgtggacaagtccagatggcagcagggcaacgtgttcagctgtagcgtgctgcacgaagccctgcacagccactacacccagaaaagcctgtctctgagccccggcaaatgataa

SEQ ID NO: 399 - DNA, 1476 bp, synthetic construct
  source 1..1476: mol_type = other DNA
atggattggatctggcgcatcctgtttctcgtgggagctgccacaggcgcccactctcaagttcacctgacacagtctggccccgaagtgcggaagcctggcacaagcgtgaaggtgtcctgtaaagcccctggcaacaccctgaaaacctacgacctgcactgggtccgatctgtgcctggacaaggactgcagtggatgggctggattagccacgagggcgacaagaaagtgatcgtggaacggttcaaggccaaagtgaccatcgactgggacagaagcaccaacaccgcctacctgcagctgagcggactgacatctggcgataccgccgtgtactactgtgccaagggcagcaagcaccggctgagagattacgccctgtacgacgatgacggcgccctgaattgggccgtcgatgtggactacctgagcaacctggaattctggggccagggaacagccgtgacagtgtctagtgcttccacaaagggccctagcgtgttccctctggctcctagcagcaagtctacaagcggaggaacagctgccctgggctgcctggtggaagattactttcctgagcctgtgaccgtgtcctggaacagcggtgctctgacttctggcgtgcacacctttccagccgtgctgcaaagcagcggcctgtactctctgagcagcgtggtcacagtgccaagctctagcctgggcacccagacctacatctgcaatgtgaaccacaagcctagcaacaccaaggtggacgacaaggtggaacccaagagctgcgacaagacccacacctgtcctccatgtcctgctccagaactgctgggcggaccttccgtgttcctgtttcctccaaagcctaaggacaccctgatgatcagcagaacccctgaagtgacctgcgtggtggtggatgtgtctcacgaggaccctgaagtgaagttcaattggtacgtggacggcgtggaagtgcacaacgccaagaccaagcctagagaggaacagtacaacagcacctacagagtggtgtccgtgctgaccgtgctgcaccaggattggctgaacggcaaagagtacaagtgcaaggtgtccaacaaggccctgcctgcccctgaggaaaagaccatcagcaaggccaagggccagcctagggaaccccaggtttacacactgcctccaagccgcgacgaactgaccaagaaccaggtgtccctgacctgcctcgtgaagggcttctacccttccgatatcgccgtggaatgggagagcaatggccagcctgagaacaactacaagacaacccctcctgtgctggacagcgacggctcattcttcctgtacagcaagctgaccgtggacaagtccagatggcagcagggcaacgtgttcagctgtagcgtgctgcacgaagccctgcacagccactacacccagaaaagcctgtctctgagccccggcaaatgataa

SEQ ID NO: 400 - DNA, 1476 bp, synthetic construct
  source 1..1476: mol_type = other DNA
atggattggatctggcgcatcctgtttctcgtgggagctgccacaggcgcccactctcaagttcacctgacacagtctggccccgaagtgcggaagcctggcacaagcgtgaaggtgtcctgtaaagcccctggcaacaccctgaaaacctacgacctgcactgggtccgatctgtgcctggacaaggactgcagtggatgggctggattagccacgagggcgacaagaaagtgatcgtggaacggttcaaggccaaagtgaccatcgactgggacagaagcaccaacaccgcctacctgcagctgagcggactgacatctggcgataccgccgtgtactactgtgccaagggcagcaagcaccggctgagagattacgccctgtacgacgatgacggcgccctgaattgggccgtcgatgtggactacctgagcaacctggaattctggggccagggaacagccgtgacagtgtctagtgcttccacaaagggccctagcgtgttccctctggctcctagcagcaagtctacaagcggaggaacagctgccctgggctgcctggtggaagattactttcctgagcctgtgaccgtgtcctggaacagcggtgctctgacttctggcgtgcacacctttccagccgtgctgcaaagcagcggcctgtactctctgagcagcgtggtcacagtgccaagctctagcctgggcacccagacctacatctgcaatgtgaaccacaagcctagcaacaccaaggtggacgacaaggtggaacccaagagctgcgacaagacccacacctgtcctccatgtcctgctccagaactgctcggcggaccttccgtgttcctgtttcctccaaagcctaaggacaccctgatgatcagcagaacccctgaagtgacctgcgtggtggtggatgtgtctcacgaggaccccgaagtgaagttcaattggtacgtggacggcgtggaagtgcacaacgccaagaccaagcctagagaggaacagtacaacagcacctacagagtggtgtccgtgctgacagtgctgcaccaggattggctgaacggcaaagagtacaagtgcaaggtgtccaacaaggccctgcctgctcctatcgagaaaaccatcagcaaggccaagggccagcctcgcgaacctcaagtctgtacactgcctcctagccgcgacgaactgaccaagaaccaggtgtccctgagctgcgccgtgaagggcttttacccttccgatatcgccgtggaatgggagagcaatggccagcctgagaacaactacaagacaacccctcctgtgctggacagcgacggctcattcttcctggtgtccaagctgacagtggacaagagcagatggcagcagggcaacgtgttcagctgcagcgtgctgcatgaagccctgcacagccactacacccagaagtccctgtctctgagccccggcaagtgataa

SEQ ID NO: 401 - DNA, 1476 bp, synthetic construct
  source 1..1476: mol_type = other DNA
atggattggatctggcgcatcctgtttctcgtgggagctgccacaggcgcccactctcaagttcacctgacacagtctggccccgaagtgcggaagcctggcacaagcgtgaaggtgtcctgtaaagcccctggcaacaccctgaaaacctacgacctgcactgggtccgatctgtgcctggacaaggactgcagtggatgggctggattagccacgagggcgacaagaaagtgatcgtggaacggttcaaggccaaagtgaccatcgactgggacagaagcaccaacaccgcctacctgcagctgagcggactgacatctggcgataccgccgtgtactactgtgccaagggcagcaagcaccggctgagagattacgccctgtacgacgatgacggcgccctgaattgggccgtcgatgtggactacctgagcaacctggaattctggggccagggaacagccgtgacagtgtctagtgcttccacaaagggccctagcgtgttccctctggctcctagcagcaagtctacaagcggaggaacagctgccctgggctgcctggtggaagattactttcctgagcctgtgaccgtgtcctggaacagcggtgctctgacttctggcgtgcacacctttccagccgtgctgcaaagcagcggcctgtactctctgagcagcgtggtcacagtgccaagctctagcctgggcacccagacctacatctgcaatgtgaaccacaagcctagcaacaccaaggtggacgacaaggtggaacccaagagctgcgacaagacccacacctgtcctccatgtcctgctccagaactgctggccggaccttccgtgttcctgtttcctccaaagcctaaggacaccctgatgatcagcagaacccctgaagtgacctgcgtggtggtggatgtgtctcacgaggaccccgaagtgaagttcaattggtacgtggacggcgtggaagtgcacaatgccaagaccaagcctagagaggaacagtacaacagcacctacagagtggtgtccgtgctgaccgtgctgcaccaggattggctgaacggcaaagagtacaagtgcaaggtgtccaacaaggccctgcctctgcctgaggaaaagaccatcagcaaggccaagggccagcctcgcgaacctcaagtctgtacactgcctcctagccgcgacgaactgaccaagaaccaggtgtccctgagctgcgccgtgaagggcttttacccttccgatatcgccgtggaatgggagagcaatggccagcctgagaacaactacaagacaacccctcctgtgctggacagcgacggctcattcttcctggtgtccaagctgacagtggacaagagcagatggcagcagggcaacgtgttcagctgcagcgtgctgcatgaagccctgcacagccactacacccagaagtccctgtctctgagccccggcaagtgataa

SEQ ID NO: 402 - DNA, 1476 bp, synthetic construct
  source 1..1476: mol_type = other DNA
atggattggatctggcgcatcctgtttctcgtgggagctgccacaggcgcccactctcaagttcacctgacacagtctggccccgaagtgcggaagcctggcacaagcgtgaaggtgtcctgtaaagcccctggcaacaccctgaaaacctacgacctgcactgggtccgatctgtgcctggacaaggactgcagtggatgggctggattagccacgagggcgacaagaaagtgatcgtggaacggttcaaggccaaagtgaccatcgactgggacagaagcaccaacaccgcctacctgcagctgagcggactgacatctggcgataccgccgtgtactactgtgccaagggcagcaagcaccggctgagagattacgccctgtacgacgatgacggcgccctgaattgggccgtcgatgtggactacctgagcaacctggaattctggggccagggaacagccgtgacagtgtctagtgcttccacaaagggccctagcgtgttccctctggctcctagcagcaagtctacaagcggaggaacagctgccctgggctgcctggtggaagattactttcctgagcctgtgaccgtgtcctggaacagcggtgctctgacttctggcgtgcacacctttccagccgtgctgcaaagcagcggcctgtactctctgagcagcgtggtcacagtgccaagctctagcctgggcacccagacctacatctgcaatgtgaaccacaagcctagcaacaccaaggtggacgacaaggtggaacccaagagctgcgacaagacccacacctgtcctccatgtcctgctccagaactgctggccggaccttccgtgttcctgtttcctccaaagcctaaggacaccctgatgatcagcagaacccctgaagtgacctgcgtggtggtggatgtgtctcacgaggaccctgaagtgaagttcaattggtacgtggacggcgtggaagtgcacaacgccaagaccaagcctagagaggaacagtacaacagcacctacagagtggtgtccgtgctgaccgtgctgcaccaggattggctgaacggcaaagagtacaagtgcaaggtgtccaacaaggccctgcctgcccctgaggaaaagaccatcagcaaggccaagggccagcctcgcgaacctcaagtctgtacactgcctcctagccgcgacgaactgaccaagaaccaggtgtccctgagctgcgccgtgaagggcttttacccttccgatatcgccgtggaatgggagagcaatggccagcctgagaacaactacaagacaacccctcctgtgctggacagcgacggctcattcttcctggtgtccaagctgacagtggacaagagcagatggcagcagggcaacgtgttcagctgcagcgtgctgcatgaagccctgcacagccactacacccagaagtccctgtctctgagccccggcaagtgataa

SEQ ID NO: 403 - DNA, 1476 bp, synthetic construct
  source 1..1476: mol_type = other DNA
atggattggatctggcgcatcctgtttctcgtgggagctgccacaggcgcccactctcaagttcacctgacacagtctggccccgaagtgcggaagcctggcacaagcgtgaaggtgtcctgtaaagcccctggcaacaccctgaaaacctacgacctgcactgggtccgatctgtgcctggacaaggactgcagtggatgggctggattagccacgagggcgacaagaaagtgatcgtggaacggttcaaggccaaagtgaccatcgactgggacagaagcaccaacaccgcctacctgcagctgagcggactgacatctggcgataccgccgtgtactactgtgccaagggcagcaagcaccggctgagagattacgccctgtacgacgatgacggcgccctgaattgggccgtcgatgtggactacctgagcaacctggaattctggggccagggaacagccgtgacagtgtctagtgcttccacaaagggccctagcgtgttccctctggctcctagcagcaagtctacaagcggaggaacagctgccctgggctgcctggtggaagattactttcctgagcctgtgaccgtgtcctggaacagcggtgctctgacttctggcgtgcacacctttccagccgtgctgcaaagcagcggcctgtactctctgagcagcgtggtcacagtgccaagctctagcctgggcacccagacctacatctgcaatgtgaaccacaagcctagcaacaccaaggtggacgacaaggtggaacccaagagctgcgacaagacccacacctgtcctccatgtcctgctccagaactgctggccggaccttccgtgttcctgtttcctccaaagcctaaggacaccctgatgatcagcagaacccctgaagtgacctgcgtggtggtggatgtgtctcacgaggaccctgaagtgaagttcaattggtacgtggacggcgtggaagtgcacaacgccaagaccaagcctagagaggaacagtacaacagcacctacagagtggtgtccgtgctgaccgtgctgcaccaggattggctgaacggcaaagagtacaagtgcaaggtgtccaacaaggccctgcctgcccctatcgaaaagaccatcagcaaggccaagggccagcctcgcgaacctcaagtctgtacactgcctcctagccgcgacgaactgaccaagaaccaggtgtccctgagctgcgccgtgaagggcttttacccttccgatatcgccgtggaatgggagagcaatggccagcctgagaacaactacaagacaacccctcctgtgctggacagcgacggctcattcttcctggtgtccaagctgacagtggacaagagcagatggcagcagggcaacgtgttcagctgcagcgtgctgcatgaagccctgcacagccactacacccagaagtccctgtctctgagccccggcaagtgataa

SEQ ID NO: 404 - DNA, 1476 bp, synthetic construct
  source 1..1476: mol_type = other DNA
atggattggatctggcgcatcctgtttctcgtgggagctgccacaggcgcccactctcaagttcacctgacacagtctggccccgaagtgcggaagcctggcacaagcgtgaaggtgtcctgtaaagcccctggcaacaccctgaaaacctacgacctgcactgggtccgatctgtgcctggacaaggactgcagtggatgggctggattagccacgagggcgacaagaaagtgatcgtggaacggttcaaggccaaagtgaccatcgactgggacagaagcaccaacaccgcctacctgcagctgagcggactgacatctggcgataccgccgtgtactactgtgccaagggcagcaagcaccggctgagagattacgccctgtacgacgatgacggcgccctgaattgggccgtcgatgtggactacctgagcaacctggaattctggggccagggaacagccgtgacagtgtctagtgcttccacaaagggccctagcgtgttccctctggctcctagcagcaagtctacaagcggaggaacagctgccctgggctgcctggtggaagattactttcctgagcctgtgaccgtgtcctggaacagcggtgctctgacttctggcgtgcacacctttccagccgtgctgcaaagcagcggcctgtactctctgagcagcgtggtcacagtgccaagctctagcctgggcacccagacctacatctgcaatgtgaaccacaagcctagcaacaccaaggtggacgacaaggtggaacccaagagctgcgacaagacccacacctgtcctccatgtcctgctccagaactgctgggcggaccttccgtgttcctgtttcctccaaagcctaaggacaccctgatgatcagcagaacccctgaagtgacctgcgtggtggtggatgtgtctcacgaggaccctgaagtgaagttcaattggtacgtggacggcgtggaagtgcacaacgccaagaccaagcctagagaggaacagtacaacagcacctacagagtggtgtccgtgctgaccgtgctgcaccaggattggctgaacggcaaagagtacaagtgcaaggtgtccaacaaggccctgcctgcccctgaggaaaagaccatcagcaaggccaagggccagcctcgcgaacctcaagtctgtacactgcctcctagccgcgacgaactgaccaagaaccaggtgtccctgagctgcgccgtgaagggcttttacccttccgatatcgccgtggaatgggagagcaatggccagcctgagaacaactacaagacaacccctcctgtgctggacagcgacggctcattcttcctggtgtccaagctgacagtggacaagagcagatggcagcagggcaacgtgttcagctgcagcgtgctgcatgaagccctgcacagccactacacccagaagtccctgtctctgagccccggcaagtgataa

SEQ ID NO: 405 - DNA, 1476 bp, synthetic construct
  source 1..1476: mol_type = other DNA
atggattggatctggcgcatcctgtttctcgtgggagctgccacaggcgcccactctcaagttcacctgacacagtctggccccgaagtgcggaagcctggcacaagcgtgaaggtgtcctgtaaagcccctggcaacaccctgaaaacctacgacctgcactgggtccgatctgtgcctggacaaggactgcagtggatgggctggattagccacgagggcgacaagaaagtgatcgtggaacggttcaaggccaaagtgaccatcgactgggacagaagcaccaacaccgcctacctgcagctgagcggactgacatctggcgataccgccgtgtactactgtgccaagggcagcaagcaccggctgagagattacgccctgtacgacgatgacggcgccctgaattgggccgtcgatgtggactacctgagcaacctggaattctggggccagggaacagccgtgacagtgtctagtgcttccacaaagggccctagcgtgttccctctggctcctagcagcaagtctacaagcggaggaacagctgccctgggctgcctggtggaagattactttcctgagcctgtgaccgtgtcctggaacagcggtgctctgacttctggcgtgcacacctttccagccgtgctgcaaagcagcggcctgtactctctgagcagcgtggtcacagtgccaagctctagcctgggcacccagacctacatctgcaatgtgaaccacaagcctagcaacaccaaggtggacgacaaggtggaacccaagagctgcgacaagacccacacctgtcctccatgtcctgctccagaactgctcggcggaccttccgtgttcctgtttcctccaaagcctaaggacaccctgatgatcagcagaacccctgaagtgacctgcgtggtggtggatgtgtctcacgaggaccccgaagtgaagttcaattggtacgtggacggcgtggaagtgcacaacgccaagaccaagcctagagaggaacagtacaacagcacctacagagtggtgtccgtgctgacagtgctgcaccaggattggctgaacggcaaagagtacaagtgcaaggtgtccaacaaggccctgcctgctcctatcgagaaaaccatcagcaaggccaagggccagcctagggaaccccaggtttacaccctgcctccatgccgcgacgaactgaccaagaaccaggtgtccctgtggtgcctggtcaagggcttctacccttccgatatcgccgtggaatgggagagcaatggccagcctgagaacaactacaagacaacccctcctgtgctggacagcgacggctcattcttcctgtacagcaagctgacagtggacaagagcagatggcagcagggcaacgtgttcagctgcagcgtgctgcatgaagccctgcacagccactacacccagaagtccctgtctctgagccccggcaagtgataa

SEQ ID NO: 406 - DNA, 1476 bp, synthetic construct
  source 1..1476: mol_type = other DNA
atggattggatctggcgcatcctgtttctcgtgggagctgccacaggcgcccactctcaagttcacctgacacagtctggccccgaagtgcggaagcctggcacaagcgtgaaggtgtcctgtaaagcccctggcaacaccctgaaaacctacgacctgcactgggtccgatctgtgcctggacaaggactgcagtggatgggctggattagccacgagggcgacaagaaagtgatcgtggaacggttcaaggccaaagtgaccatcgactgggacagaagcaccaacaccgcctacctgcagctgagcggactgacatctggcgataccgccgtgtactactgtgccaagggcagcaagcaccggctgagagattacgccctgtacgacgatgacggcgccctgaattgggccgtcgatgtggactacctgagcaacctggaattctggggccagggaacagccgtgacagtgtctagtgcttccacaaagggccctagcgtgttccctctggctcctagcagcaagtctacaagcggaggaacagctgccctgggctgcctggtggaagattactttcctgagcctgtgaccgtgtcctggaacagcggtgctctgacttctggcgtgcacacctttccagccgtgctgcaaagcagcggcctgtactctctgagcagcgtggtcacagtgccaagctctagcctgggcacccagacctacatctgcaatgtgaaccacaagcctagcaacaccaaggtggacgacaaggtggaacccaagagctgcgacaagacccacacctgtcctccatgtcctgctccagaactgctggccggaccttccgtgttcctgtttcctccaaagcctaaggacaccctgatgatcagcagaacccctgaagtgacctgcgtggtggtggatgtgtctcacgaggaccccgaagtgaagttcaattggtacgtggacggcgtggaagtgcacaatgccaagaccaagcctagagaggaacagtacaacagcacctacagagtggtgtccgtgctgaccgtgctgcaccaggattggctgaacggcaaagagtacaagtgcaaggtgtccaacaaggccctgcctctgcctgaggaaaagaccatcagcaaggccaagggccagcctagggaaccccaggtttacaccctgcctccatgccgcgacgaactgaccaagaaccaggtgtccctgtggtgcctggtcaagggcttctacccttccgatatcgccgtggaatgggagagcaatggccagcctgagaacaactacaagacaacccctcctgtgctggacagcgacggctcattcttcctgtacagcaagctgacagtggacaagagcagatggcagcagggcaacgtgttcagctgcagcgtgctgcatgaagccctgcacagccactacacccagaagtccctgtctctgagccccggcaagtgataa

SEQ ID NO: 407 - DNA, 1476 bp, synthetic construct
  source 1..1476: mol_type = other DNA
atggattggatctggcgcatcctgtttctcgtgggagctgccacaggcgcccactctcaagttcacctgacacagtctggccccgaagtgcggaagcctggcacaagcgtgaaggtgtcctgtaaagcccctggcaacaccctgaaaacctacgacctgcactgggtccgatctgtgcctggacaaggactgcagtggatgggctggattagccacgagggcgacaagaaagtgatcgtggaacggttcaaggccaaagtgaccatcgactgggacagaagcaccaacaccgcctacctgcagctgagcggactgacatctggcgataccgccgtgtactactgtgccaagggcagcaagcaccggctgagagattacgccctgtacgacgatgacggcgccctgaattgggccgtcgatgtggactacctgagcaacctggaattctggggccagggaacagccgtgacagtgtctagtgcttccacaaagggccctagcgtgttccctctggctcctagcagcaagtctacaagcggaggaacagctgccctgggctgcctggtggaagattactttcctgagcctgtgaccgtgtcctggaacagcggtgctctgacttctggcgtgcacacctttccagccgtgctgcaaagcagcggcctgtactctctgagcagcgtggtcacagtgccaagctctagcctgggcacccagacctacatctgcaatgtgaaccacaagcctagcaacaccaaggtggacgacaaggtggaacccaagagctgcgacaagacccacacctgtcctccatgtcctgctccagaactgctggccggaccttccgtgttcctgtttcctccaaagcctaaggacaccctgatgatcagcagaacccctgaagtgacctgcgtggtggtggatgtgtctcacgaggaccctgaagtgaagttcaattggtacgtggacggcgtggaagtgcacaacgccaagaccaagcctagagaggaacagtacaacagcacctacagagtggtgtccgtgctgaccgtgctgcaccaggattggctgaacggcaaagagtacaagtgcaaggtgtccaacaaggccctgcctgcccctgaggaaaagaccatcagcaaggccaagggccagcctagggaaccccaggtttacaccctgcctccatgccgcgacgaactgaccaagaaccaggtgtccctgtggtgcctggtcaagggcttctacccttccgatatcgccgtggaatgggagagcaatggccagcctgagaacaactacaagacaacccctcctgtgctggacagcgacggctcattcttcctgtacagcaagctgacagtggacaagagcagatggcagcagggcaacgtgttcagctgcagcgtgctgcatgaagccctgcacagccactacacccagaagtccctgtctctgagccccggcaagtgataa

SEQ ID NO: 408 - DNA, 1476 bp, synthetic construct
  source 1..1476: mol_type = other DNA
atggattggatctggcgcatcctgtttctcgtgggagctgccacaggcgcccactctcaagttcacctgacacagtctggccccgaagtgcggaagcctggcacaagcgtgaaggtgtcctgtaaagcccctggcaacaccctgaaaacctacgacctgcactgggtccgatctgtgcctggacaaggactgcagtggatgggctggattagccacgagggcgacaagaaagtgatcgtggaacggttcaaggccaaagtgaccatcgactgggacagaagcaccaacaccgcctacctgcagctgagcggactgacatctggcgataccgccgtgtactactgtgccaagggcagcaagcaccggctgagagattacgccctgtacgacgatgacggcgccctgaattgggccgtcgatgtggactacctgagcaacctggaattctggggccagggaacagccgtgacagtgtctagtgcttccacaaagggccctagcgtgttccctctggctcctagcagcaagtctacaagcggaggaacagctgccctgggctgcctggtggaagattactttcctgagcctgtgaccgtgtcctggaacagcggtgctctgacttctggcgtgcacacctttccagccgtgctgcaaagcagcggcctgtactctctgagcagcgtggtcacagtgccaagctctagcctgggcacccagacctacatctgcaatgtgaaccacaagcctagcaacaccaaggtggacgacaaggtggaacccaagagctgcgacaagacccacacctgtcctccatgtcctgctccagaactgctggccggaccttccgtgttcctgtttcctccaaagcctaaggacaccctgatgatcagcagaacccctgaagtgacctgcgtggtggtggatgtgtctcacgaggaccctgaagtgaagttcaattggtacgtggacggcgtggaagtgcacaacgccaagaccaagcctagagaggaacagtacaacagcacctacagagtggtgtccgtgctgaccgtgctgcaccaggattggctgaacggcaaagagtacaagtgcaaggtgtccaacaaggccctgcctgcccctatcgaaaagaccatcagcaaggccaagggccagcctagggaaccccaggtttacaccctgcctccatgccgcgacgaactgaccaagaaccaggtgtccctgtggtgcctggtcaagggcttctacccttccgatatcgccgtggaatgggagagcaatggccagcctgagaacaactacaagacaacccctcctgtgctggacagcgacggctcattcttcctgtacagcaagctgacagtggacaagagcagatggcagcagggcaacgtgttcagctgcagcgtgctgcatgaagccctgcacagccactacacccagaagtccctgtctctgagccccggcaagtgataa

SEQ ID NO: 409 - DNA, 1476 bp, synthetic construct
  source 1..1476: mol_type = other DNA
atggattggatctggcgcatcctgtttctcgtgggagctgccacaggcgcccactctcaagttcacctgacacagtctggccccgaagtgcggaagcctggcacaagcgtgaaggtgtcctgtaaagcccctggcaacaccctgaaaacctacgacctgcactgggtccgatctgtgcctggacaaggactgcagtggatgggctggattagccacgagggcgacaagaaagtgatcgtggaacggttcaaggccaaagtgaccatcgactgggacagaagcaccaacaccgcctacctgcagctgagcggactgacatctggcgataccgccgtgtactactgtgccaagggcagcaagcaccggctgagagattacgccctgtacgacgatgacggcgccctgaattgggccgtcgatgtggactacctgagcaacctggaattctggggccagggaacagccgtgacagtgtctagtgcttccacaaagggccctagcgtgttccctctggctcctagcagcaagtctacaagcggaggaacagctgccctgggctgcctggtggaagattactttcctgagcctgtgaccgtgtcctggaacagcggtgctctgacttctggcgtgcacacctttccagccgtgctgcaaagcagcggcctgtactctctgagcagcgtggtcacagtgccaagctctagcctgggcacccagacctacatctgcaatgtgaaccacaagcctagcaacaccaaggtggacgacaaggtggaacccaagagctgcgacaagacccacacctgtcctccatgtcctgctccagaactgctgggcggaccttccgtgttcctgtttcctccaaagcctaaggacaccctgatgatcagcagaacccctgaagtgacctgcgtggtggtggatgtgtctcacgaggaccctgaagtgaagttcaattggtacgtggacggcgtggaagtgcacaacgccaagaccaagcctagagaggaacagtacaacagcacctacagagtggtgtccgtgctgaccgtgctgcaccaggattggctgaacggcaaagagtacaagtgcaaggtgtccaacaaggccctgcctgcccctgaggaaaagaccatcagcaaggccaagggccagcctagggaaccccaggtttacaccctgcctccatgccgcgacgaactgaccaagaaccaggtgtccctgtggtgcctggtcaagggcttctacccttccgatatcgccgtggaatgggagagcaatggccagcctgagaacaactacaagacaacccctcctgtgctggacagcgacggctcattcttcctgtacagcaagctgacagtggacaagagcagatggcagcagggcaacgtgttcagctgcagcgtgctgcatgaagccctgcacagccactacacccagaagtccctgtctctgagccccggcaagtgataa

SEQ ID NO: 410 - RNA, 1476 nt, synthetic construct
  source 1..1476: mol_type = other RNA
atggattggatctggcgcatcctgtttctcgtgggagctgccacaggcgcccactctcaagttcacctgacacagtctggccccgaagtgcggaagcctggcacaagcgtgaaggtgtcctgtaaagcccctggcaacaccctgaaaacctacgacctgcactgggtccgatctgtgcctggacaaggactgcagtggatgggctggattagccacgagggcgacaagaaagtgatcgtggaacggttcaaggccaaagtgaccatcgactgggacagaagcaccaacaccgcctacctgcagctgagcggactgacatctggcgataccgccgtgtactactgtgccaagggcagcaagcaccggctgagagattacgccctgtacgacgatgacggcgccctgaattgggccgtcgatgtggactacctgagcaacctggaattctggggccagggaacagccgtgacagtgtctagtgcttccacaaagggccctagcgtgttccctctggctcctagcagcaagtctacaagcggaggaacagctgccctgggctgcctggtggaagattactttcctgagcctgtgaccgtgtcctggaacagcggtgctctgacttctggcgtgcacacctttccagccgtgctgcaaagcagcggcctgtactctctgagcagcgtggtcacagtgccaagctctagcctgggcacccagacctacatctgcaatgtgaaccacaagcctagcaacaccaaggtggacgacagagtggaacccaagagctgcgacaagacccacacctgtcctccatgtcctgctccagaactgctcggcggaccttccgtgttcctgtttcctccaaagcctaaggacaccctgatgatcagcagaacccctgaagtgacctgcgtggtggtggatgtgtctcacgaggaccccgaagtgaagttcaattggtacgtggacggcgtggaagtgcacaacgccaagaccaagcctagagaggaacagtacaacagcacctacagagtggtgtccgtgctgacagtgctgcaccaggattggctgaacggcaaagagtacaagtgcaaggtgtccaacaaggccctgcctgctcctatcgagaaaaccatcagcaaggccaagggccagcctagggaaccccaggtttacacactgcctccaagccgcgaggaaatgaccaagaaccaggtgtccctgacctgcctcgtgaagggcttctacccttccgatatcgccgtggaatgggagagcaatggccagcctgagaacaactacaagacaacccctcctgtgctggacagcgacggctcattcttcctgtacagcaagctgactgtggataagtcccggtggcagcagggcaacgtgttcagctgttctgtgatgcacgaagccctgcacaaccactacacccagaaaagcctgtctctgagccccggcaagtgataa

SEQ ID NO: 411 - RNA, 1476 nt, synthetic construct
  source 1..1476: mol_type = other RNA
atggattggatctggcgcatcctgtttctcgtgggagctgccacaggcgcccactctcaagttcacctgacacagtctggccccgaagtgcggaagcctggcacaagcgtgaaggtgtcctgtaaagcccctggcaacaccctgaaaacctacgacctgcactgggtccgatctgtgcctggacaaggactgcagtggatgggctggattagccacgagggcgacaagaaagtgatcgtggaacggttcaaggccaaagtgaccatcgactgggacagaagcaccaacaccgcctacctgcagctgagcggactgacatctggcgataccgccgtgtactactgtgccaagggcagcaagcaccggctgagagattacgccctgtacgacgatgacggcgccctgaattgggccgtcgatgtggactacctgagcaacctggaattctggggccagggaacagccgtgacagtgtctagtgcttccacaaagggccctagcgtgttccctctggctcctagcagcaagtctacaagcggaggaacagctgccctgggctgcctggtggaagattactttcctgagcctgtgaccgtgtcctggaacagcggtgctctgacttctggcgtgcacacctttccagccgtgctgcaaagcagcggcctgtactctctgagcagcgtggtcacagtgccaagctctagcctgggcacccagacctacatctgcaatgtgaaccacaagcctagcaacaccaaggtggacgacagagtggaacccaagagctgcgacaagacccacacctgtcctccatgtcctgctccagaactgctcggcggaccttccgtgttcctgtttcctccaaagcctaaggacaccctgatgatcagcagaacccctgaagtgacctgcgtggtggtggatgtgtctcacgaggaccccgaagtgaagttcaattggtacgtggacggcgtggaagtgcacaacgccaagaccaagcctagagaggaacagtacaacagcacctacagagtggtgtccgtgctgacagtgctgcaccaggattggctgaacggcaaagagtacaagtgcaaggtgtccaacaaggccctgcctgctcctatcgagaaaaccatcagcaaggccaagggccagcctagggaaccccaggtttacacactgcctccaagccgcgaggaaatgaccaagaaccaggtgtccctgacctgcctcgtgaagggcttctacccttccgatatcgccgtggaatgggagagcaatggccagcctgagaacaactacaagacaacccctcctgtgctggacagcgacggctcattcttcctgtacagcaagctgaccgtggacaagtccagatggcagcagggcaacgtgttcagctgtagcgtgctgcacgaagccctgcacagccactacacccagaaaagcctgtctctgagccccggcaaatgataa

SEQ ID NO: 412 - RNA, 1476 nt, synthetic construct
  source 1..1476: mol_type = other RNA
atggattggatctggcgcatcctgtttctcgtgggagctgccacaggcgcccactctcaagttcacctgacacagtctggccccgaagtgcggaagcctggcacaagcgtgaaggtgtcctgtaaagcccctggcaacaccctgaaaacctacgacctgcactgggtccgatctgtgcctggacaaggactgcagtggatgggctggattagccacgagggcgacaagaaagtgatcgtggaacggttcaaggccaaagtgaccatcgactgggacagaagcaccaacaccgcctacctgcagctgagcggactgacatctggcgataccgccgtgtactactgtgccaagggcagcaagcaccggctgagagattacgccctgtacgacgatgacggcgccctgaattgggccgtcgatgtggactacctgagcaacctggaattctggggccagggaacagccgtgacagtgtctagtgcttccacaaagggccctagcgtgttccctctggctcctagcagcaagtctacaagcggaggaacagctgccctgggctgcctggtggaagattactttcctgagcctgtgaccgtgtcctggaacagcggtgctctgacttctggcgtgcacacctttccagccgtgctgcaaagcagcggcctgtactctctgagcagcgtggtcacagtgccaagctctagcctgggcacccagacctacatctgcaatgtgaaccacaagcctagcaacaccaaggtggacgacagagtggaacccaagagctgcgacaagacccacacctgtcctccatgtcctgctccagaactgctggccggaccttccgtgttcctgtttcctccaaagcctaaggacaccctgatgatcagcagaacccctgaagtgacctgcgtggtggtggatgtgtctcacgaggaccccgaagtgaagttcaattggtacgtggacggcgtggaagtgcacaatgccaagaccaagcctagagaggaacagtacaacagcacctacagagtggtgtccgtgctgaccgtgctgcaccaggattggctgaacggcaaagagtacaagtgcaaggtgtccaacaaggccctgcctctgcctgaggaaaagaccatcagcaaggccaagggccagcctagggaaccccaggtttacacactgcctccaagccgcgaggaaatgaccaagaaccaggtgtccctgacctgcctcgtgaagggcttctacccttccgatatcgccgtggaatgggagagcaatggccagcctgagaacaactacaagacaacccctcctgtgctggacagcgacggctcattcttcctgtacagcaagctgaccgtggacaagtccagatggcagcagggcaacgtgttcagctgtagcgtgctgcacgaagccctgcacagccactacacccagaaaagcctgtctctgagccccggcaaatgataa

SEQ ID NO: 413 - RNA, 1476 nt, synthetic construct
  source 1..1476: mol_type = other RNA
atggattggatctggcgcatcctgtttctcgtgggagctgccacaggcgcccactctcaagttcacctgacacagtctggccccgaagtgcggaagcctggcacaagcgtgaaggtgtcctgtaaagcccctggcaacaccctgaaaacctacgacctgcactgggtccgatctgtgcctggacaaggactgcagtggatgggctggattagccacgagggcgacaagaaagtgatcgtggaacggttcaaggccaaagtgaccatcgactgggacagaagcaccaacaccgcctacctgcagctgagcggactgacatctggcgataccgccgtgtactactgtgccaagggcagcaagcaccggctgagagattacgccctgtacgacgatgacggcgccctgaattgggccgtcgatgtggactacctgagcaacctggaattctggggccagggaacagccgtgacagtgtctagtgcttccacaaagggccctagcgtgttccctctggctcctagcagcaagtctacaagcggaggaacagctgccctgggctgcctggtggaagattactttcctgagcctgtgaccgtgtcctggaacagcggtgctctgacttctggcgtgcacacctttccagccgtgctgcaaagcagcggcctgtactctctgagcagcgtggtcacagtgccaagctctagcctgggcacccagacctacatctgcaatgtgaaccacaagcctagcaacaccaaggtggacgacagagtggaacccaagagctgcgacaagacccacacctgtcctccatgtcctgctccagaactgctggccggaccttccgtgttcctgtttcctccaaagcctaaggacaccctgatgatcagcagaacccctgaagtgacctgcgtggtggtggatgtgtctcacgaggaccctgaagtgaagttcaattggtacgtggacggcgtggaagtgcacaacgccaagaccaagcctagagaggaacagtacaacagcacctacagagtggtgtccgtgctgaccgtgctgcaccaggattggctgaacggcaaagagtacaagtgcaaggtgtccaacaaggccctgcctgcccctgaggaaaagaccatcagcaaggccaagggccagcctagggaaccccaggtttacacactgcctccaagccgcgaggaaatgaccaagaaccaggtgtccctgacctgcctcgtgaagggcttctacccttccgatatcgccgtggaatgggagagcaatggccagcctgagaacaactacaagacaacccctcctgtgctggacagcgacggctcattcttcctgtacagcaagctgaccgtggacaagtccagatggcagcagggcaacgtgttcagctgtagcgtgctgcacgaagccctgcacagccactacacccagaaaagcctgtctctgagccccggcaaatgataa

SEQ ID NO: 414 - RNA, 1476 nt, synthetic construct
  source 1..1476: mol_type = other RNA
atggattggatctggcgcatcctgtttctcgtgggagctgccacaggcgcccactctcaagttcacctgacacagtctggccccgaagtgcggaagcctggcacaagcgtgaaggtgtcctgtaaagcccctggcaacaccctgaaaacctacgacctgcactgggtccgatctgtgcctggacaaggactgcagtggatgggctggattagccacgagggcgacaagaaagtgatcgtggaacggttcaaggccaaagtgaccatcgactgggacagaagcaccaacaccgcctacctgcagctgagcggactgacatctggcgataccgccgtgtactactgtgccaagggcagcaagcaccggctgagagattacgccctgtacgacgatgacggcgccctgaattgggccgtcgatgtggactacctgagcaacctggaattctggggccagggaacagccgtgacagtgtctagtgcttccacaaagggccctagcgtgttccctctggctcctagcagcaagtctacaagcggaggaacagctgccctgggctgcctggtggaagattactttcctgagcctgtgaccgtgtcctggaacagcggtgctctgacttctggcgtgcacacctttccagccgtgctgcaaagcagcggcctgtactctctgagcagcgtggtcacagtgccaagctctagcctgggcacccagacctacatctgcaatgtgaaccacaagcctagcaacaccaaggtggacgacagagtggaacccaagagctgcgacaagacccacacctgtcctccatgtcctgctccagaactgctggccggaccttccgtgttcctgtttcctccaaagcctaaggacaccctgatgatcagcagaacccctgaagtgacctgcgtggtggtggatgtgtctcacgaggaccctgaagtgaagttcaattggtacgtggacggcgtggaagtgcacaacgccaagaccaagcctagagaggaacagtacaacagcacctacagagtggtgtccgtgctgaccgtgctgcaccaggattggctgaacggcaaagagtacaagtgcaaggtgtccaacaaggccctgcctgcccctatcgaaaagaccatcagcaaggccaagggccagcctagggaaccccaggtttacacactgcctccaagccgcgaggaaatgaccaagaaccaggtgtccctgacctgcctcgtgaagggcttctacccttccgatatcgccgtggaatgggagagcaatggccagcctgagaacaactacaagacaacccctcctgtgctggacagcgacggctcattcttcctgtacagcaagctgaccgtggacaagtccagatggcagcagggcaacgtgttcagctgtagcgtgctgcacgaagccctgcacagccactacacccagaaaagcctgtctctgagccccggcaaatgataa

SEQ ID NO: 415 - RNA, 1476 nt, synthetic construct
  source 1..1476: mol_type = other RNA
atggattggatctggcgcatcctgtttctcgtgggagctgccacaggcgcccactctcaagttcacctgacacagtctggccccgaagtgcggaagcctggcacaagcgtgaaggtgtcctgtaaagcccctggcaacaccctgaaaacctacgacctgcactgggtccgatctgtgcctggacaaggactgcagtggatgggctggattagccacgagggcgacaagaaagtgatcgtggaacggttcaaggccaaagtgaccatcgactgggacagaagcaccaacaccgcctacctgcagctgagcggactgacatctggcgataccgccgtgtactactgtgccaagggcagcaagcaccggctgagagattacgccctgtacgacgatgacggcgccctgaattgggccgtcgatgtggactacctgagcaacctggaattctggggccagggaacagccgtgacagtgtctagtgcttccacaaagggccctagcgtgttccctctggctcctagcagcaagtctacaagcggaggaacagctgccctgggctgcctggtggaagattactttcctgagcctgtgaccgtgtcctggaacagcggtgctctgacttctggcgtgcacacctttccagccgtgctgcaaagcagcggcctgtactctctgagcagcgtggtcacagtgccaagctctagcctgggcacccagacctacatctgcaatgtgaaccacaagcctagcaacaccaaggtggacgacagagtggaacccaagagctgcgacaagacccacacctgtcctccatgtcctgctccagaactgctgggcggaccttccgtgttcctgtttcctccaaagcctaaggacaccctgatgatcagcagaacccctgaagtgacctgcgtggtggtggatgtgtctcacgaggaccctgaagtgaagttcaattggtacgtggacggcgtggaagtgcacaacgccaagaccaagcctagagaggaacagtacaacagcacctacagagtggtgtccgtgctgaccgtgctgcaccaggattggctgaacggcaaagagtacaagtgcaaggtgtccaacaaggccctgcctgcccctgaggaaaagaccatcagcaaggccaagggccagcctagggaaccccaggtttacacactgcctccaagccgcgaggaaatgaccaagaaccaggtgtccctgacctgcctcgtgaagggcttctacccttccgatatcgccgtggaatgggagagcaatggccagcctgagaacaactacaagacaacccctcctgtgctggacagcgacggctcattcttcctgtacagcaagctgaccgtggacaagtccagatggcagcagggcaacgtgttcagctgtagcgtgctgcacgaagccctgcacagccactacacccagaaaagcctgtctctgagccccggcaaatgataa

SEQ ID NO: 416 - RNA, 1476 nt, synthetic construct
  source 1..1476: mol_type = other RNA
atggattggatctggcgcatcctgtttctcgtgggagctgccacaggcgcccactctcaagttcacctgacacagtctggccccgaagtgcggaagcctggcacaagcgtgaaggtgtcctgtaaagcccctggcaacaccctgaaaacctacgacctgcactgggtccgatctgtgcctggacaaggactgcagtggatgggctggattagccacgagggcgacaagaaagtgatcgtggaacggttcaaggccaaagtgaccatcgactgggacagaagcaccaacaccgcctacctgcagctgagcggactgacatctggcgataccgccgtgtactactgtgccaagggcagcaagcaccggctgagagattacgccctgtacgacgatgacggcgccctgaattgggccgtcgatgtggactacctgagcaacctggaattctggggccagggaacagccgtgacagtgtctagtgcttccacaaagggccctagcgtgttccctctggctcctagcagcaagtctacaagcggaggaacagctgccctgggctgcctggtggaagattactttcctgagcctgtgaccgtgtcctggaacagcggtgctctgacttctggcgtgcacacctttccagccgtgctgcaaagcagcggcctgtactctctgagcagcgtggtcacagtgccaagctctagcctgggcacccagacctacatctgcaatgtgaaccacaagcctagcaacaccaaggtggacgacagagtggaacccaagagctgcgacaagacccacacctgtcctccatgtcctgctccagaactgctcggcggaccttccgtgttcctgtttcctccaaagcctaaggacaccctgatgatcagcagaacccctgaagtgacctgcgtggtggtggatgtgtctcacgaggaccccgaagtgaagttcaattggtacgtggacggcgtggaagtgcacaacgccaagaccaagcctagagaggaacagtacaacagcacctacagagtggtgtccgtgctgacagtgctgcaccaggattggctgaacggcaaagagtacaagtgcaaggtgtccaacaaggccctgcctgctcctatcgagaaaaccatcagcaaggccaagggccagcctagggaaccccaagtctgtacactgcctcctagccgcgaggaaatgaccaagaaccaggtgtccctgagctgcgccgtgaagggcttttacccttccgatatcgccgtggaatgggagagcaatggccagcctgagaacaactacaagacaacccctcctgtgctggacagcgacggctcattcttcctggtgtccaagctgacagtggacaagagcagatggcagcagggcaacgtgttcagctgctctgtgctgcacgaagccctgcacagccactacacccagaagtccctgtctctgagccccggcaagtgataa

SEQ ID NO: 417 - RNA, 1476 nt, synthetic construct
  source 1..1476: mol_type = other RNA
atggattggatctggcgcatcctgtttctcgtgggagctgccacaggcgcccactctcaagttcacctgacacagtctggccccgaagtgcggaagcctggcacaagcgtgaaggtgtcctgtaaagcccctggcaacaccctgaaaacctacgacctgcactgggtccgatctgtgcctggacaaggactgcagtggatgggctggattagccacgagggcgacaagaaagtgatcgtggaacggttcaaggccaaagtgaccatcgactgggacagaagcaccaacaccgcctacctgcagctgagcggactgacatctggcgataccgccgtgtactactgtgccaagggcagcaagcaccggctgagagattacgccctgtacgacgatgacggcgccctgaattgggccgtcgatgtggactacctgagcaacctggaattctggggccagggaacagccgtgacagtgtctagtgcttccacaaagggccctagcgtgttccctctggctcctagcagcaagtctacaagcggaggaacagctgccctgggctgcctggtggaagattactttcctgagcctgtgaccgtgtcctggaacagcggtgctctgacttctggcgtgcacacctttccagccgtgctgcaaagcagcggcctgtactctctgagcagcgtggtcacagtgccaagctctagcctgggcacccagacctacatctgcaatgtgaaccacaagcctagcaacaccaaggtggacgacagagtggaacccaagagctgcgacaagacccacacctgtcctccatgtcctgctccagaactgctggccggaccttccgtgttcctgtttcctccaaagcctaaggacaccctgatgatcagcagaacccctgaagtgacctgcgtggtggtggatgtgtctcacgaggaccccgaagtgaagttcaattggtacgtggacggcgtggaagtgcacaatgccaagaccaagcctagagaggaacagtacaacagcacctacagagtggtgtccgtgctgaccgtgctgcaccaggattggctgaacggcaaagagtacaagtgcaaggtgtccaacaaggccctgcctctgcctgaggaaaagaccatcagcaaggccaagggccagcctagggaaccccaagtctgtacactgcctcctagccgcgaggaaatgaccaagaaccaggtgtccctgagctgcgccgtgaagggcttttacccttccgatatcgccgtggaatgggagagcaatggccagcctgagaacaactacaagacaacccctcctgtgctggacagcgacggctcattcttcctggtgtccaagctgacagtggacaagagcagatggcagcagggcaacgtgttcagctgctctgtgctgcacgaagccctgcacagccactacacccagaagtccctgtctctgagccccggcaagtgataa

SEQ ID NO: 418 - RNA, 1476 nt, synthetic construct
  source 1..1476: mol_type = other RNA
atggattggatctggcgcatcctgtttctcgtgggagctgccacaggcgcccactctcaagttcacctgacacagtctggccccgaagtgcggaagcctggcacaagcgtgaaggtgtcctgtaaagcccctggcaacaccctgaaaacctacgacctgcactgggtccgatctgtgcctggacaaggactgcagtggatgggctggattagccacgagggcgacaagaaagtgatcgtggaacggttcaaggccaaagtgaccatcgactgggacagaagcaccaacaccgcctacctgcagctgagcggactgacatctggcgataccgccgtgtactactgtgccaagggcagcaagcaccggctgagagattacgccctgtacgacgatgacggcgccctgaattgggccgtcgatgtggactacctgagcaacctggaattctggggccagggaacagccgtgacagtgtctagtgcttccacaaagggccctagcgtgttccctctggctcctagcagcaagtctacaagcggaggaacagctgccctgggctgcctggtggaagattactttcctgagcctgtgaccgtgtcctggaacagcggtgctctgacttctggcgtgcacacctttccagccgtgctgcaaagcagcggcctgtactctctgagcagcgtggtcacagtgccaagctctagcctgggcacccagacctacatctgcaatgtgaaccacaagcctagcaacaccaaggtggacgacagagtggaacccaagagctgcgacaagacccacacctgtcctccatgtcctgctccagaactgctggccggaccttccgtgttcctgtttcctccaaagcctaaggacaccctgatgatcagcagaacccctgaagtgacctgcgtggtggtggatgtgtctcacgaggaccctgaagtgaagttcaattggtacgtggacggcgtggaagtgcacaacgccaagaccaagcctagagaggaacagtacaacagcacctacagagtggtgtccgtgctgaccgtgctgcaccaggattggctgaacggcaaagagtacaagtgcaaggtgtccaacaaggccctgcctgcccctgaggaaaagaccatcagcaaggccaagggccagcctagggaaccccaagtctgtacactgcctcctagccgcgaggaaatgaccaagaaccaggtgtccctgagctgcgccgtgaagggcttttacccttccgatatcgccgtggaatgggagagcaatggccagcctgagaacaactacaagacaacccctcctgtgctggacagcgacggctcattcttcctggtgtccaagctgacagtggacaagagcagatggcagcagggcaacgtgttcagctgctctgtgctgcacgaagccctgcacagccactacacccagaagtccctgtctctgagccccggcaagtgataa

SEQ ID NO: 419 - RNA, 1476 nt, synthetic construct
  source 1..1476: mol_type = other RNA
atggattggatctggcgcatcctgtttctcgtgggagctgccacaggcgcccactctcaagttcacctgacacagtctggccccgaagtgcggaagcctggcacaagcgtgaaggtgtcctgtaaagcccctggcaacaccctgaaaacctacgacctgcactgggtccgatctgtgcctggacaaggactgcagtggatgggctggattagccacgagggcgacaagaaagtgatcgtggaacggttcaaggccaaagtgaccatcgactgggacagaagcaccaacaccgcctacctgcagctgagcggactgacatctggcgataccgccgtgtactactgtgccaagggcagcaagcaccggctgagagattacgccctgtacgacgatgacggcgccctgaattgggccgtcgatgtggactacctgagcaacctggaattctggggccagggaacagccgtgacagtgtctagtgcttccacaaagggccctagcgtgttccctctggctcctagcagcaagtctacaagcggaggaacagctgccctgggctgcctggtggaagattactttcctgagcctgtgaccgtgtcctggaacagcggtgctctgacttctggcgtgcacacctttccagccgtgctgcaaagcagcggcctgtactctctgagcagcgtggtcacagtgccaagctctagcctgggcacccagacctacatctgcaatgtgaaccacaagcctagcaacaccaaggtggacgacagagtggaacccaagagctgcgacaagacccacacctgtcctccatgtcctgctccagaactgctggccggaccttccgtgttcctgtttcctccaaagcctaaggacaccctgatgatcagcagaacccctgaagtgacctgcgtggtggtggatgtgtctcacgaggaccctgaagtgaagttcaattggtacgtggacggcgtggaagtgcacaacgccaagaccaagcctagagaggaacagtacaacagcacctacagagtggtgtccgtgctgaccgtgctgcaccaggattggctgaacggcaaagagtacaagtgcaaggtgtccaacaaggccctgcctgcccctatcgaaaagaccatcagcaaggccaagggccagcctagggaaccccaagtctgtacactgcctcctagccgcgaggaaatgaccaagaaccaggtgtccctgagctgcgccgtgaagggcttttacccttccgatatcgccgtggaatgggagagcaatggccagcctgagaacaactacaagacaacccctcctgtgctggacagcgacggctcattcttcctggtgtccaagctgacagtggacaagagcagatggcagcagggcaacgtgttcagctgctctgtgctgcacgaagccctgcacagccactacacccagaagtccctgtctctgagccccggcaagtgataa

SEQ ID NO: 420 - RNA, 1476 nt, synthetic construct
  source 1..1476: mol_type = other RNA
atggattggatctggcgcatcctgtttctcgtgggagctgccacaggcgcccactctcaagttcacctgacacagtctggccccgaagtgcggaagcctggcacaagcgtgaaggtgtcctgtaaagcccctggcaacaccctgaaaacctacgacctgcactgggtccgatctgtgcctggacaaggactgcagtggatgggctggattagccacgagggcgacaagaaagtgatcgtggaacggttcaaggccaaagtgaccatcgactgggacagaagcaccaacaccgcctacctgcagctgagcggactgacatctggcgataccgccgtgtactactgtgccaagggcagcaagcaccggctgagagattacgccctgtacgacgatgacggcgccctgaattgggccgtcgatgtggactacctgagcaacctggaattctggggccagggaacagccgtgacagtgtctagtgcttccacaaagggccctagcgtgttccctctggctcctagcagcaagtctacaagcggaggaacagctgccctgggctgcctggtggaagattactttcctgagcctgtgaccgtgtcctggaacagcggtgctctgacttctggcgtgcacacctttccagccgtgctgcaaagcagcggcctgtactctctgagcagcgtggtcacagtgccaagctctagcctgggcacccagacctacatctgcaatgtgaaccacaagcctagcaacaccaaggtggacgacagagtggaacccaagagctgcgacaagacccacacctgtcctccatgtcctgctccagaactgctgggcggaccttccgtgttcctgtttcctccaaagcctaaggacaccctgatgatcagcagaacccctgaagtgacctgcgtggtggtggatgtgtctcacgaggaccctgaagtgaagttcaattggtacgtggacggcgtggaagtgcacaacgccaagaccaagcctagagaggaacagtacaacagcacctacagagtggtgtccgtgctgaccgtgctgcaccaggattggctgaacggcaaagagtacaagtgcaaggtgtccaacaaggccctgcctgcccctgaggaaaagaccatcagcaaggccaagggccagcctagggaaccccaagtctgtacactgcctcctagccgcgaggaaatgaccaagaaccaggtgtccctgagctgcgccgtgaagggcttttacccttccgatatcgccgtggaatgggagagcaatggccagcctgagaacaactacaagacaacccctcctgtgctggacagcgacggctcattcttcctggtgtccaagctgacagtggacaagagcagatggcagcagggcaacgtgttcagctgctctgtgctgcacgaagccctgcacagccactacacccagaagtccctgtctctgagccccggcaagtgataa

SEQ ID NO: 421 - RNA, 1476 nt, synthetic construct
  source 1..1476: mol_type = other RNA
atggattggatctggcgcatcctgtttctcgtgggagctgccacaggcgcccactctcaagttcacctgacacagtctggccccgaagtgcggaagcctggcacaagcgtgaaggtgtcctgtaaagcccctggcaacaccctgaaaacctacgacctgcactgggtccgatctgtgcctggacaaggactgcagtggatgggctggattagccacgagggcgacaagaaagtgatcgtggaacggttcaaggccaaagtgaccatcgactgggacagaagcaccaacaccgcctacctgcagctgagcggactgacatctggcgataccgccgtgtactactgtgccaagggcagcaagcaccggctgagagattacgccctgtacgacgatgacggcgccctgaattgggccgtcgatgtggactacctgagcaacctggaattctggggccagggaacagccgtgacagtgtctagtgcttccacaaagggccctagcgtgttccctctggctcctagcagcaagtctacaagcggaggaacagctgccctgggctgcctggtggaagattactttcctgagcctgtgaccgtgtcctggaacagcggtgctctgacttctggcgtgcacacctttccagccgtgctgcaaagcagcggcctgtactctctgagcagcgtggtcacagtgccaagctctagcctgggcacccagacctacatctgcaatgtgaaccacaagcctagcaacaccaaggtggacgacagagtggaacccaagagctgcgacaagacccacacctgtcctccatgtcctgctccagaactgctcggcggaccttccgtgttcctgtttcctccaaagcctaaggacaccctgatgatcagcagaacccctgaagtgacctgcgtggtggtggatgtgtctcacgaggaccccgaagtgaagttcaattggtacgtggacggcgtggaagtgcacaacgccaagaccaagcctagagaggaacagtacaacagcacctacagagtggtgtccgtgctgacagtgctgcaccaggattggctgaacggcaaagagtacaagtgcaaggtgtccaacaaggccctgcctgctcctatcgagaaaaccatcagcaaggccaagggccagcctagggaaccccaggtttacaccctgcctccatgccgcgaggaaatgaccaagaaccaggtgtccctgtggtgcctcgtgaagggcttctacccttccgatatcgccgtggaatgggagagcaatggccagcctgagaacaactacaagacaacccctcctgtgctggacagcgacggctcattcttcctgtacagcaagctgaccgtggacaagtccagatggcagcagggcaacgtgttcagctgtagcgtgctgcacgaagccctgcacagccactacacccagaagtccctgtctctgagccccggcaagtgataa

SEQ ID NO: 422 - RNA, 1476 nt, synthetic construct
  source 1..1476: mol_type = other RNA
atggattggatctggcgcatcctgtttctcgtgggagctgccacaggcgcccactctcaagttcacctgacacagtctggccccgaagtgcggaagcctggcacaagcgtgaaggtgtcctgtaaagcccctggcaacaccctgaaaacctacgacctgcactgggtccgatctgtgcctggacaaggactgcagtggatgggctggattagccacgagggcgacaagaaagtgatcgtggaacggttcaaggccaaagtgaccatcgactgggacagaagcaccaacaccgcctacctgcagctgagcggactgacatctggcgataccgccgtgtactactgtgccaagggcagcaagcaccggctgagagattacgccctgtacgacgatgacggcgccctgaattgggccgtcgatgtggactacctgagcaacctggaattctggggccagggaacagccgtgacagtgtctagtgcttccacaaagggccctagcgtgttccctctggctcctagcagcaagtctacaagcggaggaacagctgccctgggctgcctggtggaagattactttcctgagcctgtgaccgtgtcctggaacagcggtgctctgacttctggcgtgcacacctttccagccgtgctgcaaagcagcggcctgtactctctgagcagcgtggtcacagtgccaagctctagcctgggcacccagacctacatctgcaatgtgaaccacaagcctagcaacaccaaggtggacgacagagtggaacccaagagctgcgacaagacccacacctgtcctccatgtcctgctccagaactgctggccggaccttccgtgttcctgtttcctccaaagcctaaggacaccctgatgatcagcagaacccctgaagtgacctgcgtggtggtggatgtgtctcacgaggaccccgaagtgaagttcaattggtacgtggacggcgtggaagtgcacaatgccaagaccaagcctagagaggaacagtacaacagcacctacagagtggtgtccgtgctgaccgtgctgcaccaggattggctgaacggcaaagagtacaagtgcaaggtgtccaacaaggccctgcctctgcctgaggaaaagaccatcagcaaggccaagggccagcctagggaaccccaggtttacaccctgcctccatgccgcgaggaaatgaccaagaaccaggtgtccctgtggtgcctcgtgaagggcttctacccttccgatatcgccgtggaatgggagagcaatggccagcctgagaacaactacaagacaacccctcctgtgctggacagcgacggctcattcttcctgtacagcaagctgaccgtggacaagtccagatggcagcagggcaacgtgttcagctgtagcgtgctgcacgaagccctgcacagccactacacccagaagtccctgtctctgagccccggcaagtgataa

SEQ ID NO: 423 - RNA, 1476 nt, synthetic construct
  source 1..1476: mol_type = other RNA
atggattggatctggcgcatcctgtttctcgtgggagctgccacaggcgcccactctcaagttcacctgacacagtctggccccgaagtgcggaagcctggcacaagcgtgaaggtgtcctgtaaagcccctggcaacaccctgaaaacctacgacctgcactgggtccgatctgtgcctggacaaggactgcagtggatgggctggattagccacgagggcgacaagaaagtgatcgtggaacggttcaaggccaaagtgaccatcgactgggacagaagcaccaacaccgcctacctgcagctgagcggactgacatctggcgataccgccgtgtactactgtgccaagggcagcaagcaccggctgagagattacgccctgtacgacgatgacggcgccctgaattgggccgtcgatgtggactacctgagcaacctggaattctggggccagggaacagccgtgacagtgtctagtgcttccacaaagggccctagcgtgttccctctggctcctagcagcaagtctacaagcggaggaacagctgccctgggctgcctggtggaagattactttcctgagcctgtgaccgtgtcctggaacagcggtgctctgacttctggcgtgcacacctttccagccgtgctgcaaagcagcggcctgtactctctgagcagcgtggtcacagtgccaagctctagcctgggcacccagacctacatctgcaatgtgaaccacaagcctagcaacaccaaggtggacgacagagtggaacccaagagctgcgacaagacccacacctgtcctccatgtcctgctccagaactgctggccggaccttccgtgttcctgtttcctccaaagcctaaggacaccctgatgatcagcagaacccctgaagtgacctgcgtggtggtggatgtgtctcacgaggaccctgaagtgaagttcaattggtacgtggacggcgtggaagtgcacaacgccaagaccaagcctagagaggaacagtacaacagcacctacagagtggtgtccgtgctgaccgtgctgcaccaggattggctgaacggcaaagagtacaagtgcaaggtgtccaacaaggccctgcctgcccctgaggaaaagaccatcagcaaggccaagggccagcctagggaaccccaggtttacaccctgcctccatgccgcgaggaaatgaccaagaaccaggtgtccctgtggtgcctcgtgaagggcttctacccttccgatatcgccgtggaatgggagagcaatggccagcctgagaacaactacaagacaacccctcctgtgctggacagcgacggctcattcttcctgtacagcaagctgaccgtggacaagtccagatggcagcagggcaacgtgttcagctgtagcgtgctgcacgaagccctgcacagccactacacccagaagtccctgtctctgagccccggcaagtgataa

SEQ ID NO: 424 - RNA, 1476 nt, synthetic construct
  source 1..1476: mol_type = other RNA
atggattggatctggcgcatcctgtttctcgtgggagctgccacaggcgcccactctcaagttcacctgacacagtctggccccgaagtgcggaagcctggcacaagcgtgaaggtgtcctgtaaagcccctggcaacaccctgaaaacctacgacctgcactgggtccgatctgtgcctggacaaggactgcagtggatgggctggattagccacgagggcgacaagaaagtgatcgtggaacggttcaaggccaaagtgaccatcgactgggacagaagcaccaacaccgcctacctgcagctgagcggactgacatctggcgataccgccgtgtactactgtgccaagggcagcaagcaccggctgagagattacgccctgtacgacgatgacggcgccctgaattgggccgtcgatgtggactacctgagcaacctggaattctggggccagggaacagccgtgacagtgtctagtgcttccacaaagggccctagcgtgttccctctggctcctagcagcaagtctacaagcggaggaacagctgccctgggctgcctggtggaagattactttcctgagcctgtgaccgtgtcctggaacagcggtgctctgacttctggcgtgcacacctttccagccgtgctgcaaagcagcggcctgtactctctgagcagcgtggtcacagtgccaagctctagcctgggcacccagacctacatctgcaatgtgaaccacaagcctagcaacaccaaggtggacgacagagtggaacccaagagctgcgacaagacccacacctgtcctccatgtcctgctccagaactgctggccggaccttccgtgttcctgtttcctccaaagcctaaggacaccctgatgatcagcagaacccctgaagtgacctgcgtggtggtggatgtgtctcacgaggaccctgaagtgaagttcaattggtacgtggacggcgtggaagtgcacaacgccaagaccaagcctagagaggaacagtacaacagcacctacagagtggtgtccgtgctgaccgtgctgcaccaggattggctgaacggcaaagagtacaagtgcaaggtgtccaacaaggccctgcctgcccctatcgaaaagaccatcagcaaggccaagggccagcctagggaaccccaggtttacaccctgcctccatgccgcgaggaaatgaccaagaaccaggtgtccctgtggtgcctcgtgaagggcttctacccttccgatatcgccgtggaatgggagagcaatggccagcctgagaacaactacaagacaacccctcctgtgctggacagcgacggctcattcttcctgtacagcaagctgaccgtggacaagtccagatggcagcagggcaacgtgttcagctgtagcgtgctgcacgaagccctgcacagccactacacccagaagtccctgtctctgagccccggcaagtgataa

SEQ ID NO: 425 - RNA, 1476 nt, synthetic construct
  source 1..1476: mol_type = other RNA
atggattggatctggcgcatcctgtttctcgtgggagctgccacaggcgcccactctcaagttcacctgacacagtctggccccgaagtgcggaagcctggcacaagcgtgaaggtgtcctgtaaagcccctggcaacaccctgaaaacctacgacctgcactgggtccgatctgtgcctggacaaggactgcagtggatgggctggattagccacgagggcgacaagaaagtgatcgtggaacggttcaaggccaaagtgaccatcgactgggacagaagcaccaacaccgcctacctgcagctgagcggactgacatctggcgataccgccgtgtactactgtgccaagggcagcaagcaccggctgagagattacgccctgtacgacgatgacggcgccctgaattgggccgtcgatgtggactacctgagcaacctggaattctggggccagggaacagccgtgacagtgtctagtgcttccacaaagggccctagcgtgttccctctggctcctagcagcaagtctacaagcggaggaacagctgccctgggctgcctggtggaagattactttcctgagcctgtgaccgtgtcctggaacagcggtgctctgacttctggcgtgcacacctttccagccgtgctgcaaagcagcggcctgtactctctgagcagcgtggtcacagtgccaagctctagcctgggcacccagacctacatctgcaatgtgaaccacaagcctagcaacaccaaggtggacgacagagtggaacccaagagctgcgacaagacccacacctgtcctccatgtcctgctccagaactgctgggcggaccttccgtgttcctgtttcctccaaagcctaaggacaccctgatgatcagcagaacccctgaagtgacctgcgtggtggtggatgtgtctcacgaggaccctgaagtgaagttcaattggtacgtggacggcgtggaagtgcacaacgccaagaccaagcctagagaggaacagtacaacagcacctacagagtggtgtccgtgctgaccgtgctgcaccaggattggctgaacggcaaagagtacaagtgcaaggtgtccaacaaggccctgcctgcccctgaggaaaagaccatcagcaaggccaagggccagcctagggaaccccaggtttacaccctgcctccatgccgcgaggaaatgaccaagaaccaggtgtccctgtggtgcctcgtgaagggcttctacccttccgatatcgccgtggaatgggagagcaatggccagcctgagaacaactacaagacaacccctcctgtgctggacagcgacggctcattcttcctgtacagcaagctgaccgtggacaagtccagatggcagcagggcaacgtgttcagctgtagcgtgctgcacgaagccctgcacagccactacacccagaagtccctgtctctgagccccggcaagtgataa

SEQ ID NO: 426 - RNA, 1476 nt, synthetic construct
  source 1..1476: mol_type = other RNA
atggattggatctggcgcatcctgtttctcgtgggagctgccacaggcgcccactctcaagttcacctgacacagtctggccccgaagtgcggaagcctggcacaagcgtgaaggtgtcctgtaaagcccctggcaacaccctgaaaacctacgacctgcactgggtccgatctgtgcctggacaaggactgcagtggatgggctggattagccacgagggcgacaagaaagtgatcgtggaacggttcaaggccaaagtgaccatcgactgggacagaagcaccaacaccgcctacctgcagctgagcggactgacatctggcgataccgccgtgtactactgtgccaagggcagcaagcaccggctgagagattacgccctgtacgacgatgacggcgccctgaattgggccgtcgatgtggactacctgagcaacctggaattctggggccagggaacagccgtgacagtgtctagtgcttccacaaagggccctagcgtgttccctctggctcctagcagcaagtctacaagcggaggaacagctgccctgggctgcctggtggaagattactttcctgagcctgtgaccgtgtcctggaacagcggtgctctgacttctggcgtgcacacctttccagccgtgctgcaaagcagcggcctgtactctctgagcagcgtggtcacagtgccaagctctagcctgggcacccagacctacatctgcaatgtgaaccacaagcctagcaacaccaaggtggacgacaaggtggaacccaagagctgcgacaagacccacacctgtcctccatgtcctgctccagaactgctcggcggaccttccgtgttcctgtttcctccaaagcctaaggacaccctgatgatcagcagaacccctgaagtgacctgcgtggtggtggatgtgtctcacgaggaccccgaagtgaagttcaattggtacgtggacggcgtggaagtgcacaacgccaagaccaagcctagagaggaacagtacaacagcacctacagagtggtgtccgtgctgacagtgctgcaccaggattggctgaacggcaaagagtacaagtgcaaggtgtccaacaaggccctgcctgctcctatcgagaaaaccatcagcaaggccaagggccagcctagggaaccccaggtttacacactgcctccaagccgcgaggaaatgaccaagaaccaggtgtccctgacctgcctcgtgaagggcttctacccttccgatatcgccgtggaatgggagagcaatggccagcctgagaacaactacaagacaacccctcctgtgctggacagcgacggctcattcttcctgtacagcaagctgactgtggataagtcccggtggcagcagggcaacgtgttcagctgttctgtgatgcacgaagccctgcacaaccactacacccagaaaagcctgtctctgagccccggcaagtgataa

SEQ ID NO: 427 - RNA, 1476 nt, synthetic construct
  source 1..1476: mol_type = other RNA
atggattggatctggcgcatcctgtttctcgtgggagctgccacaggcgcccactctcaagttcacctgacacagtctggccccgaagtgcggaagcctggcacaagcgtgaaggtgtcctgtaaagcccctggcaacaccctgaaaacctacgacctgcactgggtccgatctgtgcctggacaaggactgcagtggatgggctggattagccacgagggcgacaagaaagtgatcgtggaacggttcaaggccaaagtgaccatcgactgggacagaagcaccaacaccgcctacctgcagctgagcggactgacatctggcgataccgccgtgtactactgtgccaagggcagcaagcaccggctgagagattacgccctgtacgacgatgacggcgccctgaattgggccgtcgatgtggactacctgagcaacctggaattctggggccagggaacagccgtgacagtgtctagtgcttccacaaagggccctagcgtgttccctctggctcctagcagcaagtctacaagcggaggaacagctgccctgggctgcctggtggaagattactttcctgagcctgtgaccgtgtcctggaacagcggtgctctgacttctggcgtgcacacctttccagccgtgctgcaaagcagcggcctgtactctctgagcagcgtggtcacagtgccaagctctagcctgggcacccagacctacatctgcaatgtgaaccacaagcctagcaacaccaaggtggacgacaaggtggaacccaagagctgcgacaagacccacacctgtcctccatgtcctgctccagaactgctcggcggaccttccgtgttcctgtttcctccaaagcctaaggacaccctgatgatcagcagaacccctgaagtgacctgcgtggtggtggatgtgtctcacgaggaccccgaagtgaagttcaattggtacgtggacggcgtggaagtgcacaacgccaagaccaagcctagagaggaacagtacaacagcacctacagagtggtgtccgtgctgacagtgctgcaccaggattggctgaacggcaaagagtacaagtgcaaggtgtccaacaaggccctgcctgctcctatcgagaaaaccatcagcaaggccaagggccagcctagggaaccccaggtttacacactgcctccaagccgcgaggaaatgaccaagaaccaggtgtccctgacctgcctcgtgaagggcttctacccttccgatatcgccgtggaatgggagagcaatggccagcctgagaacaactacaagacaacccctcctgtgctggacagcgacggctcattcttcctgtacagcaagctgaccgtggacaagtccagatggcagcagggcaacgtgttcagctgtagcgtgctgcacgaagccctgcacagccactacacccagaaaagcctgtctctgagccccggcaaatgataa

SEQ ID NO: 428 - RNA, 1476 nt, synthetic construct
  source 1..1476: mol_type = other RNA
atggattggatctggcgcatcctgtttctcgtgggagctgccacaggcgcccactctcaagttcacctgacacagtctggccccgaagtgcggaagcctggcacaagcgtgaaggtgtcctgtaaagcccctggcaacaccctgaaaacctacgacctgcactgggtccgatctgtgcctggacaaggactgcagtggatgggctggattagccacgagggcgacaagaaagtgatcgtggaacggttcaaggccaaagtgaccatcgactgggacagaagcaccaacaccgcctacctgcagctgagcggactgacatctggcgataccgccgtgtactactgtgccaagggcagcaagcaccggctgagagattacgccctgtacgacgatgacggcgccctgaattgggccgtcgatgtggactacctgagcaacctggaattctggggccagggaacagccgtgacagtgtctagtgcttccacaaagggccctagcgtgttccctctggctcctagcagcaagtctacaagcggaggaacagctgccctgggctgcctggtggaagattactttcctgagcctgtgaccgtgtcctggaacagcggtgctctgacttctggcgtgcacacctttccagccgtgctgcaaagcagcggcctgtactctctgagcagcgtggtcacagtgccaagctctagcctgggcacccagacctacatctgcaatgtgaaccacaagcctagcaacaccaaggtggacgacaaggtggaacccaagagctgcgacaagacccacacctgtcctccatgtcctgctccagaactgctggccggaccttccgtgttcctgtttcctccaaagcctaaggacaccctgatgatcagcagaacccctgaagtgacctgcgtggtggtggatgtgtctcacgaggaccccgaagtgaagttcaattggtacgtggacggcgtggaagtgcacaatgccaagaccaagcctagagaggaacagtacaacagcacctacagagtggtgtccgtgctgaccgtgctgcaccaggattggctgaacggcaaagagtacaagtgcaaggtgtccaacaaggccctgcctctgcctgaggaaaagaccatcagcaaggccaagggccagcctagggaaccccaggtttacacactgcctccaagccgcgaggaaatgaccaagaaccaggtgtccctgacctgcctcgtgaagggcttctacccttccgatatcgccgtggaatgggagagcaatggccagcctgagaacaactacaagacaacccctcctgtgctggacagcgacggctcattcttcctgtacagcaagctgaccgtggacaagtccagatggcagcagggcaacgtgttcagctgtagcgtgctgcacgaagccctgcacagccactacacccagaaaagcctgtctctgagccccggcaaatgataa

SEQ ID NO: 429 - RNA, 1476 nt, synthetic construct
  source 1..1476: mol_type = other RNA
atggattggatctggcgcatcctgtttctcgtgggagctgccacaggcgcccactctcaagttcacctgacacagtctggccccgaagtgcggaagcctggcacaagcgtgaaggtgtcctgtaaagcccctggcaacaccctgaaaacctacgacctgcactgggtccgatctgtgcctggacaaggactgcagtggatgggctggattagccacgagggcgacaagaaagtgatcgtggaacggttcaaggccaaagtgaccatcgactgggacagaagcaccaacaccgcctacctgcagctgagcggactgacatctggcgataccgccgtgtactactgtgccaagggcagcaagcaccggctgagagattacgccctgtacgacgatgacggcgccctgaattgggccgtcgatgtggactacctgagcaacctggaattctggggccagggaacagccgtgacagtgtctagtgcttccacaaagggccctagcgtgttccctctggctcctagcagcaagtctacaagcggaggaacagctgccctgggctgcctggtggaagattactttcctgagcctgtgaccgtgtcctggaacagcggtgctctgacttctggcgtgcacacctttccagccgtgctgcaaagcagcggcctgtactctctgagcagcgtggtcacagtgccaagctctagcctgggcacccagacctacatctgcaatgtgaaccacaagcctagcaacaccaaggtggacgacaaggtggaacccaagagctgcgacaagacccacacctgtcctccatgtcctgctccagaactgctggccggaccttccgtgttcctgtttcctccaaagcctaaggacaccctgatgatcagcagaacccctgaagtgacctgcgtggtggtggatgtgtctcacgaggaccctgaagtgaagttcaattggtacgtggacggcgtggaagtgcacaacgccaagaccaagcctagagaggaacagtacaacagcacctacagagtggtgtccgtgctgaccgtgctgcaccaggattggctgaacggcaaagagtacaagtgcaaggtgtccaacaaggccctgcctgcccctgaggaaaagaccatcagcaaggccaagggccagcctagggaaccccaggtttacacactgcctccaagccgcgaggaaatgaccaagaaccaggtgtccctgacctgcctcgtgaagggcttctacccttccgatatcgccgtggaatgggagagcaatggccagcctgagaacaactacaagacaacccctcctgtgctggacagcgacggctcattcttcctgtacagcaagctgaccgtggacaagtccagatggcagcagggcaacgtgttcagctgtagcgtgctgcacgaagccctgcacagccactacacccagaaaagcctgtctctgagccccggcaaatgataa

SEQ ID NO: 430 - RNA, 1476 nt, synthetic construct
  source 1..1476: mol_type = other RNA
atggattggatctggcgcatcctgtttctcgtgggagctgccacaggcgcccactctcaagttcacctgacacagtctggccccgaagtgcggaagcctggcacaagcgtgaaggtgtcctgtaaagcccctggcaacaccctgaaaacctacgacctgcactgggtccgatctgtgcctggacaaggactgcagtggatgggctggattagccacgagggcgacaagaaagtgatcgtggaacggttcaaggccaaagtgaccatcgactgggacagaagcaccaacaccgcctacctgcagctgagcggactgacatctggcgataccgccgtgtactactgtgccaagggcagcaagcaccggctgagagattacgccctgtacgacgatgacggcgccctgaattgggccgtcgatgtggactacctgagcaacctggaattctggggccagggaacagccgtgacagtgtctagtgcttccacaaagggccctagcgtgttccctctggctcctagcagcaagtctacaagcggaggaacagctgccctgggctgcctggtggaagattactttcctgagcctgtgaccgtgtcctggaacagcggtgctctgacttctggcgtgcacacctttccagccgtgctgcaaagcagcggcctgtactctctgagcagcgtggtcacagtgccaagctctagcctgggcacccagacctacatctgcaatgtgaaccacaagcctagcaacaccaaggtggacgacaaggtggaacccaagagctgcgacaagacccacacctgtcctccatgtcctgctccagaactgctggccggaccttccgtgttcctgtttcctccaaagcctaaggacaccctgatgatcagcagaacccctgaagtgacctgcgtggtggtggatgtgtctcacgaggaccctgaagtgaagttcaattggtacgtggacggcgtggaagtgcacaacgccaagaccaagcctagagaggaacagtacaacagcacctacagagtggtgtccgtgctgaccgtgctgcaccaggattggctgaacggcaaagagtacaagtgcaaggtgtccaacaaggccctgcctgcccctatcgaaaagaccatcagcaaggccaagggccagcctagggaaccccaggtttacacactgcctccaagccgcgaggaaatgaccaagaaccaggtgtccctgacctgcctcgtgaagggcttctacccttccgatatcgccgtggaatgggagagcaatggccagcctgagaacaactacaagacaacccctcctgtgctggacagcgacggctcattcttcctgtacagcaagctgaccgtggacaagtccagatggcagcagggcaacgtgttcagctgtagcgtgctgcacgaagccctgcacagccactacacccagaaaagcctgtctctgagccccggcaaatgataa

SEQ ID NO: 431 - RNA, 1476 nt, synthetic construct
  source 1..1476: mol_type = other RNA
atggattggatctggcgcatcctgtttctcgtgggagctgccacaggcgcccactctcaagttcacctgacacagtctggccccgaagtgcggaagcctggcacaagcgtgaaggtgtcctgtaaagcccctggcaacaccctgaaaacctacgacctgcactgggtccgatctgtgcctggacaaggactgcagtggatgggctggattagccacgagggcgacaagaaagtgatcgtggaacggttcaaggccaaagtgaccatcgactgggacagaagcaccaacaccgcctacctgcagctgagcggactgacatctggcgataccgccgtgtactactgtgccaagggcagcaagcaccggctgagagattacgccctgtacgacgatgacggcgccctgaattgggccgtcgatgtggactacctgagcaacctggaattctggggccagggaacagccgtgacagtgtctagtgcttccacaaagggccctagcgtgttccctctggctcctagcagcaagtctacaagcggaggaacagctgccctgggctgcctggtggaagattactttcctgagcctgtgaccgtgtcctggaacagcggtgctctgacttctggcgtgcacacctttccagccgtgctgcaaagcagcggcctgtactctctgagcagcgtggtcacagtgccaagctctagcctgggcacccagacctacatctgcaatgtgaaccacaagcctagcaacaccaaggtggacgacaaggtggaacccaagagctgcgacaagacccacacctgtcctccatgtcctgctccagaactgctgggcggaccttccgtgttcctgtttcctccaaagcctaaggacaccctgatgatcagcagaacccctgaagtgacctgcgtggtggtggatgtgtctcacgaggaccctgaagtgaagttcaattggtacgtggacggcgtggaagtgcacaacgccaagaccaagcctagagaggaacagtacaacagcacctacagagtggtgtccgtgctgaccgtgctgcaccaggattggctgaacggcaaagagtacaagtgcaaggtgtccaacaaggccctgcctgcccctgaggaaaagaccatcagcaaggccaagggccagcctagggaaccccaggtttacacactgcctccaagccgcgaggaaatgaccaagaaccaggtgtccctgacctgcctcgtgaagggcttctacccttccgatatcgccgtggaatgggagagcaatggccagcctgagaacaactacaagacaacccctcctgtgctggacagcgacggctcattcttcctgtacagcaagctgaccgtggacaagtccagatggcagcagggcaacgtgttcagctgtagcgtgctgcacgaagccctgcacagccactacacccagaaaagcctgtctctgagccccggcaaatgataa

SEQ ID NO: 432 - RNA, 1476 nt, synthetic construct
  source 1..1476: mol_type = other RNA
atggattggatctggcgcatcctgtttctcgtgggagctgccacaggcgcccactctcaagttcacctgacacagtctggccccgaagtgcggaagcctggcacaagcgtgaaggtgtcctgtaaagcccctggcaacaccctgaaaacctacgacctgcactgggtccgatctgtgcctggacaaggactgcagtggatgggctggattagccacgagggcgacaagaaagtgatcgtggaacggttcaaggccaaagtgaccatcgactgggacagaagcaccaacaccgcctacctgcagctgagcggactgacatctggcgataccgccgtgtactactgtgccaagggcagcaagcaccggctgagagattacgccctgtacgacgatgacggcgccctgaattgggccgtcgatgtggactacctgagcaacctggaattctggggccagggaacagccgtgacagtgtctagtgcttccacaaagggccctagcgtgttccctctggctcctagcagcaagtctacaagcggaggaacagctgccctgggctgcctggtggaagattactttcctgagcctgtgaccgtgtcctggaacagcggtgctctgacttctggcgtgcacacctttccagccgtgctgcaaagcagcggcctgtactctctgagcagcgtggtcacagtgccaagctctagcctgggcacccagacctacatctgcaatgtgaaccacaagcctagcaacaccaaggtggacgacaaggtggaacccaagagctgcgacaagacccacacctgtcctccatgtcctgctccagaactgctcggcggaccttccgtgttcctgtttcctccaaagcctaaggacaccctgatgatcagcagaacccctgaagtgacctgcgtggtggtggatgtgtctcacgaggaccccgaagtgaagttcaattggtacgtggacggcgtggaagtgcacaacgccaagaccaagcctagagaggaacagtacaacagcacctacagagtggtgtccgtgctgacagtgctgcaccaggattggctgaacggcaaagagtacaagtgcaaggtgtccaacaaggccctgcctgctcctatcgagaaaaccatcagcaaggccaagggccagcctagggaaccccaagtctgtacactgcctcctagccgcgaggaaatgaccaagaaccaggtgtccctgagctgcgccgtgaagggcttttacccttccgatatcgccgtggaatgggagagcaatggccagcctgagaacaactacaagacaacccctcctgtgctggacagcgacggctcattcttcctggtgtccaagctgacagtggacaagagcagatggcagcagggcaacgtgttcagctgctctgtgctgcacgaagccctgcacagccactacacccagaagtccctgtctctgagccccggcaagtgataa

SEQ ID NO: 433 - RNA, 1476 nt, synthetic construct
  source 1..1476: mol_type = other RNA
atggattggatctggcgcatcctgtttctcgtgggagctgccacaggcgcccactctcaagttcacctgacacagtctggccccgaagtgcggaagcctggcacaagcgtgaaggtgtcctgtaaagcccctggcaacaccctgaaaacctacgacctgcactgggtccgatctgtgcctggacaaggactgcagtggatgggctggattagccacgagggcgacaagaaagtgatcgtggaacggttcaaggccaaagtgaccatcgactgggacagaagcaccaacaccgcctacctgcagctgagcggactgacatctggcgataccgccgtgtactactgtgccaagggcagcaagcaccggctgagagattacgccctgtacgacgatgacggcgccctgaattgggccgtcgatgtggactacctgagcaacctggaattctggggccagggaacagccgtgacagtgtctagtgcttccacaaagggccctagcgtgttccctctggctcctagcagcaagtctacaagcggaggaacagctgccctgggctgcctggtggaagattactttcctgagcctgtgaccgtgtcctggaacagcggtgctctgacttctggcgtgcacacctttccagccgtgctgcaaagcagcggcctgtactctctgagcagcgtggtcacagtgccaagctctagcctgggcacccagacctacatctgcaatgtgaaccacaagcctagcaacaccaaggtggacgacaaggtggaacccaagagctgcgacaagacccacacctgtcctccatgtcctgctccagaactgctggccggaccttccgtgttcctgtttcctccaaagcctaaggacaccctgatgatcagcagaacccctgaagtgacctgcgtggtggtggatgtgtctcacgaggaccccgaagtgaagttcaattggtacgtggacggcgtggaagtgcacaatgccaagaccaagcctagagaggaacagtacaacagcacctacagagtggtgtccgtgctgaccgtgctgcaccaggattggctgaacggcaaagagtacaagtgcaaggtgtccaacaaggccctgcctctgcctgaggaaaagaccatcagcaaggccaagggccagcctagggaaccccaagtctgtacactgcctcctagccgcgaggaaatgaccaagaaccaggtgtccctgagctgcgccgtgaagggcttttacccttccgatatcgccgtggaatgggagagcaatggccagcctgagaacaactacaagacaacccctcctgtgctggacagcgacggctcattcttcctggtgtccaagctgacagtggacaagagcagatggcagcagggcaacgtgttcagctgctctgtgctgcacgaagccctgcacagccactacacccagaagtccctgtctctgagccccggcaagtgataa

SEQ ID NO: 434 - RNA, 1476 nt, synthetic construct
  source 1..1476: mol_type = other RNA
atggattggatctggcgcatcctgtttctcgtgggagctgccacaggcgcccactctcaagttcacctgacacagtctggccccgaagtgcggaagcctggcacaagcgtgaaggtgtcctgtaaagcccctggcaacaccctgaaaacctacgacctgcactgggtccgatctgtgcctggacaaggactgcagtggatgggctggattagccacgagggcgacaagaaagtgatcgtggaacggttcaaggccaaagtgaccatcgactgggacagaagcaccaacaccgcctacctgcagctgagcggactgacatctggcgataccgccgtgtactactgtgccaagggcagcaagcaccggctgagagattacgccctgtacgacgatgacggcgccctgaattgggccgtcgatgtggactacctgagcaacctggaattctggggccagggaacagccgtgacagtgtctagtgcttccacaaagggccctagcgtgttccctctggctcctagcagcaagtctacaagcggaggaacagctgccctgggctgcctggtggaagattactttcctgagcctgtgaccgtgtcctggaacagcggtgctctgacttctggcgtgcacacctttccagccgtgctgcaaagcagcggcctgtactctctgagcagcgtggtcacagtgccaagctctagcctgggcacccagacctacatctgcaatgtgaaccacaagcctagcaacaccaaggtggacgacaaggtggaacccaagagctgcgacaagacccacacctgtcctccatgtcctgctccagaactgctggccggaccttccgtgttcctgtttcctccaaagcctaaggacaccctgatgatcagcagaacccctgaagtgacctgcgtggtggtggatgtgtctcacgaggaccctgaagtgaagttcaattggtacgtggacggcgtggaagtgcacaacgccaagaccaagcctagagaggaacagtacaacagcacctacagagtggtgtccgtgctgaccgtgctgcaccaggattggctgaacggcaaagagtacaagtgcaaggtgtccaacaaggccctgcctgcccctgaggaaaagaccatcagcaaggccaagggccagcctagggaaccccaagtctgtacactgcctcctagccgcgaggaaatgaccaagaaccaggtgtccctgagctgcgccgtgaagggcttttacccttccgatatcgccgtggaatgggagagcaatggccagcctgagaacaactacaagacaacccctcctgtgctggacagcgacggctcattcttcctggtgtccaagctgacagtggacaagagcagatggcagcagggcaacgtgttcagctgctctgtgctgcacgaagccctgcacagccactacacccagaagtccctgtctctgagccccggcaagtgataa

SEQ ID NO: 435 - RNA, 1476 nt, synthetic construct
  source 1..1476: mol_type = other RNA
atggattggatctggcgcatcctgtttctcgtgggagctgccacaggcgcccactctcaagttcacctgacacagtctggccccgaagtgcggaagcctggcacaagcgtgaaggtgtcctgtaaagcccctggcaacaccctgaaaacctacgacctgcactgggtccgatctgtgcctggacaaggactgcagtggatgggctggattagccacgagggcgacaagaaagtgatcgtggaacggttcaaggccaaagtgaccatcgactgggacagaagcaccaacaccgcctacctgcagctgagcggactgacatctggcgataccgccgtgtactactgtgccaagggcagcaagcaccggctgagagattacgccctgtacgacgatgacggcgccctgaattgggccgtcgatgtggactacctgagcaacctggaattctggggccagggaacagccgtgacagtgtctagtgcttccacaaagggccctagcgtgttccctctggctcctagcagcaagtctacaagcggaggaacagctgccctgggctgcctggtggaagattactttcctgagcctgtgaccgtgtcctggaacagcggtgctctgacttctggcgtgcacacctttccagccgtgctgcaaagcagcggcctgtactctctgagcagcgtggtcacagtgccaagctctagcctgggcacccagacctacatctgcaatgtgaaccacaagcctagcaacaccaaggtggacgacaaggtggaacccaagagctgcgacaagacccacacctgtcctccatgtcctgctccagaactgctggccggaccttccgtgttcctgtttcctccaaagcctaaggacaccctgatgatcagcagaacccctgaagtgacctgcgtggtggtggatgtgtctcacgaggaccctgaagtgaagttcaattggtacgtggacggcgtggaagtgcacaacgccaagaccaagcctagagaggaacagtacaacagcacctacagagtggtgtccgtgctgaccgtgctgcaccaggattggctgaacggcaaagagtacaagtgcaaggtgtccaacaaggccctgcctgcccctatcgaaaagaccatcagcaaggccaagggccagcctagggaaccccaagtctgtacactgcctcctagccgcgaggaaatgaccaagaaccaggtgtccctgagctgcgccgtgaagggcttttacccttccgatatcgccgtggaatgggagagcaatggccagcctgagaacaactacaagacaacccctcctgtgctggacagcgacggctcattcttcctggtgtccaagctgacagtggacaagagcagatggcagcagggcaacgtgttcagctgctctgtgctgcacgaagccctgcacagccactacacccagaagtccctgtctctgagccccggcaagtgataa

SEQ ID NO: 436 - RNA, 1476 nt, synthetic construct
  source 1..1476: mol_type = other RNA
atggattggatctggcgcatcctgtttctcgtgggagctgccacaggcgcccactctcaagttcacctgacacagtctggccccgaagtgcggaagcctggcacaagcgtgaaggtgtcctgtaaagcccctggcaacaccctgaaaacctacgacctgcactgggtccgatctgtgcctggacaaggactgcagtggatgggctggattagccacgagggcgacaagaaagtgatcgtggaacggttcaaggccaaagtgaccatcgactgggacagaagcaccaacaccgcctacctgcagctgagcggactgacatctggcgataccgccgtgtactactgtgccaagggcagcaagcaccggctgagagattacgccctgtacgacgatgacggcgccctgaattgggccgtcgatgtggactacctgagcaacctggaattctggggccagggaacagccgtgacagtgtctagtgcttccacaaagggccctagcgtgttccctctggctcctagcagcaagtctacaagcggaggaacagctgccctgggctgcctggtggaagattactttcctgagcctgtgaccgtgtcctggaacagcggtgctctgacttctggcgtgcacacctttccagccgtgctgcaaagcagcggcctgtactctctgagcagcgtggtcacagtgccaagctctagcctgggcacccagacctacatctgcaatgtgaaccacaagcctagcaacaccaaggtggacgacaaggtggaacccaagagctgcgacaagacccacacctgtcctccatgtcctgctccagaactgctgggcggaccttccgtgttcctgtttcctccaaagcctaaggacaccctgatgatcagcagaacccctgaagtgacctgcgtggtggtggatgtgtctcacgaggaccctgaagtgaagttcaattggtacgtggacggcgtggaagtgcacaacgccaagaccaagcctagagaggaacagtacaacagcacctacagagtggtgtccgtgctgaccgtgctgcaccaggattggctgaacggcaaagagtacaagtgcaaggtgtccaacaaggccctgcctgcccctgaggaaaagaccatcagcaaggccaagggccagcctagggaaccccaagtctgtacactgcctcctagccgcgaggaaatgaccaagaaccaggtgtccctgagctgcgccgtgaagggcttttacccttccgatatcgccgtggaatgggagagcaatggccagcctgagaacaactacaagacaacccctcctgtgctggacagcgacggctcattcttcctggtgtccaagctgacagtggacaagagcagatggcagcagggcaacgtgttcagctgctctgtgctgcacgaagccctgcacagccactacacccagaagtccctgtctctgagccccggcaagtgataa

SEQ ID NO: 437 - RNA, 1476 nt, synthetic construct
  source 1..1476: mol_type = other RNA
atggattggatctggcgcatcctgtttctcgtgggagctgccacaggcgcccactctcaagttcacctgacacagtctggccccgaagtgcggaagcctggcacaagcgtgaaggtgtcctgtaaagcccctggcaacaccctgaaaacctacgacctgcactgggtccgatctgtgcctggacaaggactgcagtggatgggctggattagccacgagggcgacaagaaagtgatcgtggaacggttcaaggccaaagtgaccatcgactgggacagaagcaccaacaccgcctacctgcagctgagcggactgacatctggcgataccgccgtgtactactgtgccaagggcagcaagcaccggctgagagattacgccctgtacgacgatgacggcgccctgaattgggccgtcgatgtggactacctgagcaacctggaattctggggccagggaacagccgtgacagtgtctagtgcttccacaaagggccctagcgtgttccctctggctcctagcagcaagtctacaagcggaggaacagctgccctgggctgcctggtggaagattactttcctgagcctgtgaccgtgtcctggaacagcggtgctctgacttctggcgtgcacacctttccagccgtgctgcaaagcagcggcctgtactctctgagcagcgtggtcacagtgccaagctctagcctgggcacccagacctacatctgcaatgtgaaccacaagcctagcaacaccaaggtggacgacaaggtggaacccaagagctgcgacaagacccacacctgtcctccatgtcctgctccagaactgctcggcggaccttccgtgttcctgtttcctccaaagcctaaggacaccctgatgatcagcagaacccctgaagtgacctgcgtggtggtggatgtgtctcacgaggaccccgaagtgaagttcaattggtacgtggacggcgtggaagtgcacaacgccaagaccaagcctagagaggaacagtacaacagcacctacagagtggtgtccgtgctgacagtgctgcaccaggattggctgaacggcaaagagtacaagtgcaaggtgtccaacaaggccctgcctgctcctatcgagaaaaccatcagcaaggccaagggccagcctagggaaccccaggtttacaccctgcctccatgccgcgaggaaatgaccaagaaccaggtgtccctgtggtgcctcgtgaagggcttctacccttccgatatcgccgtggaatgggagagcaatggccagcctgagaacaactacaagacaacccctcctgtgctggacagcgacggctcattcttcctgtacagcaagctgaccgtggacaagtccagatggcagcagggcaacgtgttcagctgtagcgtgctgcacgaagccctgcacagccactacacccagaagtccctgtctctgagccccggcaagtgataa

SEQ ID NO: 438 - RNA, 1476 nt, synthetic construct
  source 1..1476: mol_type = other RNA
atggattggatctggcgcatcctgtttctcgtgggagctgccacaggcgcccactctcaagttcacctgacacagtctggccccgaagtgcggaagcctggcacaagcgtgaaggtgtcctgtaaagcccctggcaacaccctgaaaacctacgacctgcactgggtccgatctgtgcctggacaaggactgcagtggatgggctggattagccacgagggcgacaagaaagtgatcgtggaacggttcaaggccaaagtgaccatcgactgggacagaagcaccaacaccgcctacctgcagctgagcggactgacatctggcgataccgccgtgtactactgtgccaagggcagcaagcaccggctgagagattacgccctgtacgacgatgacggcgccctgaattgggccgtcgatgtggactacctgagcaacctggaattctggggccagggaacagccgtgacagtgtctagtgcttccacaaagggccctagcgtgttccctctggctcctagcagcaagtctacaagcggaggaacagctgccctgggctgcctggtggaagattactttcctgagcctgtgaccgtgtcctggaacagcggtgctctgacttctggcgtgcacacctttccagccgtgctgcaaagcagcggcctgtactctctgagcagcgtggtcacagtgccaagctctagcctgggcacccagacctacatctgcaatgtgaaccacaagcctagcaacaccaaggtggacgacaaggtggaacccaagagctgcgacaagacccacacctgtcctccatgtcctgctccagaactgctggccggaccttccgtgttcctgtttcctccaaagcctaaggacaccctgatgatcagcagaacccctgaagtgacctgcgtggtggtggatgtgtctcacgaggaccccgaagtgaagttcaattggtacgtggacggcgtggaagtgcacaatgccaagaccaagcctagagaggaacagtacaacagcacctacagagtggtgtccgtgctgaccgtgctgcaccaggattggctgaacggcaaagagtacaagtgcaaggtgtccaacaaggccctgcctctgcctgaggaaaagaccatcagcaaggccaagggccagcctagggaaccccaggtttacaccctgcctccatgccgcgaggaaatgaccaagaaccaggtgtccctgtggtgcctcgtgaagggcttctacccttccgatatcgccgtggaatgggagagcaatggccagcctgagaacaactacaagacaacccctcctgtgctggacagcgacggctcattcttcctgtacagcaagctgaccgtggacaagtccagatggcagcagggcaacgtgttcagctgtagcgtgctgcacgaagccctgcacagccactacacccagaagtccctgtctctgagccccggcaagtgataa

SEQ ID NO: 439 - RNA, 1476 nt, synthetic construct
  source 1..1476: mol_type = other RNA
atggattggatctggcgcatcctgtttctcgtgggagctgccacaggcgcccactctcaagttcacctgacacagtctggccccgaagtgcggaagcctggcacaagcgtgaaggtgtcctgtaaagcccctggcaacaccctgaaaacctacgacctgcactgggtccgatctgtgcctggacaaggactgcagtggatgggctggattagccacgagggcgacaagaaagtgatcgtggaacggttcaaggccaaagtgaccatcgactgggacagaagcaccaacaccgcctacctgcagctgagcggactgacatctggcgataccgccgtgtactactgtgccaagggcagcaagcaccggctgagagattacgccctgtacgacgatgacggcgccctgaattgggccgtcgatgtggactacctgagcaacctggaattctggggccagggaacagccgtgacagtgtctagtgcttccacaaagggccctagcgtgttccctctggctcctagcagcaagtctacaagcggaggaacagctgccctgggctgcctggtggaagattactttcctgagcctgtgaccgtgtcctggaacagcggtgctctgacttctggcgtgcacacctttccagccgtgctgcaaagcagcggcctgtactctctgagcagcgtggtcacagtgccaagctctagcctgggcacccagacctacatctgcaatgtgaaccacaagcctagcaacaccaaggtggacgacaaggtggaacccaagagctgcgacaagacccacacctgtcctccatgtcctgctccagaactgctggccggaccttccgtgttcctgtttcctccaaagcctaaggacaccctgatgatcagcagaacccctgaagtgacctgcgtggtggtggatgtgtctcacgaggaccctgaagtgaagttcaattggtacgtggacggcgtggaagtgcacaacgccaagaccaagcctagagaggaacagtacaacagcacctacagagtggtgtccgtgctgaccgtgctgcaccaggattggctgaacggcaaagagtacaagtgcaaggtgtccaacaaggccctgcctgcccctgaggaaaagaccatcagcaaggccaagggccagcctagggaaccccaggtttacaccctgcctccatgccgcgaggaaatgaccaagaaccaggtgtccctgtggtgcctcgtgaagggcttctacccttccgatatcgccgtggaatgggagagcaatggccagcctgagaacaactacaagacaacccctcctgtgctggacagcgacggctcattcttcctgtacagcaagctgaccgtggacaagtccagatggcagcagggcaacgtgttcagctgtagcgtgctgcacgaagccctgcacagccactacacccagaagtccctgtctctgagccccggcaagtgataa

SEQ ID NO: 440 - RNA, 1476 nt, synthetic construct
  source 1..1476: mol_type = other RNA
atggattggatctggcgcatcctgtttctcgtgggagctgccacaggcgcccactctcaagttcacctgacacagtctggccccgaagtgcggaagcctggcacaagcgtgaaggtgtcctgtaaagcccctggcaacaccctgaaaacctacgacctgcactgggtccgatctgtgcctggacaaggactgcagtggatgggctggattagccacgagggcgacaagaaagtgatcgtggaacggttcaaggccaaagtgaccatcgactgggacagaagcaccaacaccgcctacctgcagctgagcggactgacatctggcgataccgccgtgtactactgtgccaagggcagcaagcaccggctgagagattacgccctgtacgacgatgacggcgccctgaattgggccgtcgatgtggactacctgagcaacctggaattctggggccagggaacagccgtgacagtgtctagtgcttccacaaagggccctagcgtgttccctctggctcctagcagcaagtctacaagcggaggaacagctgccctgggctgcctggtggaagattactttcctgagcctgtgaccgtgtcctggaacagcggtgctctgacttctggcgtgcacacctttccagccgtgctgcaaagcagcggcctgtactctctgagcagcgtggtcacagtgccaagctctagcctgggcacccagacctacatctgcaatgtgaaccacaagcctagcaacaccaaggtggacgacaaggtggaacccaagagctgcgacaagacccacacctgtcctccatgtcctgctccagaactgctggccggaccttccgtgttcctgtttcctccaaagcctaaggacaccctgatgatcagcagaacccctgaagtgacctgcgtggtggtggatgtgtctcacgaggaccctgaagtgaagttcaattggtacgtggacggcgtggaagtgcacaacgccaagaccaagcctagagaggaacagtacaacagcacctacagagtggtgtccgtgctgaccgtgctgcaccaggattggctgaacggcaaagagtacaagtgcaaggtgtccaacaaggccctgcctgcccctatcgaaaagaccatcagcaaggccaagggccagcctagggaaccccaggtttacaccctgcctccatgccgcgaggaaatgaccaagaaccaggtgtccctgtggtgcctcgtgaagggcttctacccttccgatatcgccgtggaatgggagagcaatggccagcctgagaacaactacaagacaacccctcctgtgctggacagcgacggctcattcttcctgtacagcaagctgaccgtggacaagtccagatggcagcagggcaacgtgttcagctgtagcgtgctgcacgaagccctgcacagccactacacccagaagtccctgtctctgagccccggcaagtgataa

SEQ ID NO: 441 - RNA, 1476 nt, synthetic construct
  source 1..1476: mol_type = other RNA
atggattggatctggcgcatcctgtttctcgtgggagctgccacaggcgcccactctcaagttcacctgacacagtctggccccgaagtgcggaagcctggcacaagcgtgaaggtgtcctgtaaagcccctggcaacaccctgaaaacctacgacctgcactgggtccgatctgtgcctggacaaggactgcagtggatgggctggattagccacgagggcgacaagaaagtgatcgtggaacggttcaaggccaaagtgaccatcgactgggacagaagcaccaacaccgcctacctgcagctgagcggactgacatctggcgataccgccgtgtactactgtgccaagggcagcaagcaccggctgagagattacgccctgtacgacgatgacggcgccctgaattgggccgtcgatgtggactacctgagcaacctggaattctggggccagggaacagccgtgacagtgtctagtgcttccacaaagggccctagcgtgttccctctggctcctagcagcaagtctacaagcggaggaacagctgccctgggctgcctggtggaagattactttcctgagcctgtgaccgtgtcctggaacagcggtgctctgacttctggcgtgcacacctttccagccgtgctgcaaagcagcggcctgtactctctgagcagcgtggtcacagtgccaagctctagcctgggcacccagacctacatctgcaatgtgaaccacaagcctagcaacaccaaggtggacgacaaggtggaacccaagagctgcgacaagacccacacctgtcctccatgtcctgctccagaactgctgggcggaccttccgtgttcctgtttcctccaaagcctaaggacaccctgatgatcagcagaacccctgaagtgacctgcgtggtggtggatgtgtctcacgaggaccctgaagtgaagttcaattggtacgtggacggcgtggaagtgcacaacgccaagaccaagcctagagaggaacagtacaacagcacctacagagtggtgtccgtgctgaccgtgctgcaccaggattggctgaacggcaaagagtacaagtgcaaggtgtccaacaaggccctgcctgcccctgaggaaaagaccatcagcaaggccaagggccagcctagggaaccccaggtttacaccctgcctccatgccgcgaggaaatgaccaagaaccaggtgtccctgtggtgcctcgtgaagggcttctacccttccgatatcgccgtggaatgggagagcaatggccagcctgagaacaactacaagacaacccctcctgtgctggacagcgacggctcattcttcctgtacagcaagctgaccgtggacaagtccagatggcagcagggcaacgtgttcagctgtagcgtgctgcacgaagccctgcacagccactacacccagaagtccctgtctctgagccccggcaagtgataa

SEQ ID NO: 442 - RNA, 1476 nt, synthetic construct
  source 1..1476: mol_type = other RNA
atggattggatctggcgcatcctgtttctcgtgggagctgccacaggcgcccactctcaagttcacctgacacagtctggccccgaagtgcggaagcctggcacaagcgtgaaggtgtcctgtaaagcccctggcaacaccctgaaaacctacgacctgcactgggtccgatctgtgcctggacaaggactgcagtggatgggctggattagccacgagggcgacaagaaagtgatcgtggaacggttcaaggccaaagtgaccatcgactgggacagaagcaccaacaccgcctacctgcagctgagcggactgacatctggcgataccgccgtgtactactgtgccaagggcagcaagcaccggctgagagattacgccctgtacgacgatgacggcgccctgaattgggccgtcgatgtggactacctgagcaacctggaattctggggccagggaacagccgtgacagtgtctagtgcttccacaaagggccctagcgtgttccctctggctcctagcagcaagtctacaagcggaggaacagctgccctgggctgcctggtggaagattactttcctgagcctgtgaccgtgtcctggaacagcggtgctctgacttctggcgtgcacacctttccagccgtgctgcaaagcagcggcctgtactctctgagcagcgtggtcacagtgccaagctctagcctgggcacccagacctacatctgcaatgtgaaccacaagcctagcaacaccaaggtggacgacaaggtggaacccaagagctgcgacaagacccacacctgtcctccatgtcctgctccagaactgctcggcggaccttccgtgttcctgtttcctccaaagcctaaggacaccctgatgatcagcagaacccctgaagtgacctgcgtggtggtggatgtgtctcacgaggaccccgaagtgaagttcaattggtacgtggacggcgtggaagtgcacaacgccaagaccaagcctagagaggaacagtacaacagcacctacagagtggtgtccgtgctgacagtgctgcaccaggattggctgaacggcaaagagtacaagtgcaaggtgtccaacaaggccctgcctgctcctatcgagaaaaccatcagcaaggccaagggccagcctagggaaccccaggtttacacactgcctccaagccgcgacgaactgaccaagaaccaggtgtccctgacctgcctcgtgaagggcttctacccttccgatatcgccgtggaatgggagagcaatggccagcctgagaacaactacaagacaacccctcctgtgctggacagcgacggctcattcttcctgtacagcaagctgactgtggataagtcccggtggcagcagggcaacgtgttcagctgttctgtgatgcacgaagccctgcacaaccactacacccagaaaagcctgtctctgagccccggcaagtgataa

SEQ ID NO: 443 - RNA, 1476 nt, synthetic construct
  source 1..1476: mol_type = other RNA
atggattggatctggcgcatcctgtttctcgtgggagctgccacaggcgcccactctcaagttcacctgacacagtctggccccgaagtgcggaagcctggcacaagcgtgaaggtgtcctgtaaagcccctggcaacaccctgaaaacctacgacctgcactgggtccgatctgtgcctggacaaggactgcagtggatgggctggattagccacgagggcgacaagaaagtgatcgtggaacggttcaaggccaaagtgaccatcgactgggacagaagcaccaacaccgcctacctgcagctgagcggactgacatctggcgataccgccgtgtactactgtgccaagggcagcaagcaccggctgagagattacgccctgtacgacgatgacggcgccctgaattgggccgtcgatgtggactacctgagcaacctggaattctggggccagggaacagccgtgacagtgtctagtgcttccacaaagggccctagcgtgttccctctggctcctagcagcaagtctacaagcggaggaacagctgccctgggctgcctggtggaagattactttcctgagcctgtgaccgtgtcctggaacagcggtgctctgacttctggcgtgcacacctttccagccgtgctgcaaagcagcggcctgtactctctgagcagcgtggtcacagtgccaagctctagcctgggcacccagacctacatctgcaatgtgaaccacaagcctagcaacaccaaggtggacgacaaggtggaacccaagagctgcgacaagacccacacctgtcctccatgtcctgctccagaactgctcggcggaccttccgtgttcctgtttcctccaaagcctaaggacaccctgatgatcagcagaacccctgaagtgacctgcgtggtggtggatgtgtctcacgaggaccccgaagtgaagttcaattggtacgtggacggcgtggaagtgcacaacgccaagaccaagcctagagaggaacagtacaacagcacctacagagtggtgtccgtgctgacagtgctgcaccaggattggctgaacggcaaagagtacaagtgcaaggtgtccaacaaggccctgcctgctcctatcgagaaaaccatcagcaaggccaagggccagcctagggaaccccaggtttacacactgcctccaagccgcgacgaactgaccaagaaccaggtgtccctgacctgcctcgtgaagggcttctacccttccgatatcgccgtggaatgggagagcaatggccagcctgagaacaactacaagacaacccctcctgtgctggacagcgacggctcattcttcctgtacagcaagctgaccgtggacaagtccagatggcagcagggcaacgtgttcagctgtagcgtgctgcacgaagccctgcacagccactacacccagaaaagcctgtctctgagccccggcaaatgataa

SEQ ID NO: 444 - RNA, 1476 nt, synthetic construct
  source 1..1476: mol_type = other RNA
atggattggatctggcgcatcctgtttctcgtgggagctgccacaggcgcccactctcaagttcacctgacacagtctggccccgaagtgcggaagcctggcacaagcgtgaaggtgtcctgtaaagcccctggcaacaccctgaaaacctacgacctgcactgggtccgatctgtgcctggacaaggactgcagtggatgggctggattagccacgagggcgacaagaaagtgatcgtggaacggttcaaggccaaagtgaccatcgactgggacagaagcaccaacaccgcctacctgcagctgagcggactgacatctggcgataccgccgtgtactactgtgccaagggcagcaagcaccggctgagagattacgccctgtacgacgatgacggcgccctgaattgggccgtcgatgtggactacctgagcaacctggaattctggggccagggaacagccgtgacagtgtctagtgcttccacaaagggccctagcgtgttccctctggctcctagcagcaagtctacaagcggaggaacagctgccctgggctgcctggtggaagattactttcctgagcctgtgaccgtgtcctggaacagcggtgctctgacttctggcgtgcacacctttccagccgtgctgcaaagcagcggcctgtactctctgagcagcgtggtcacagtgccaagctctagcctgggcacccagacctacatctgcaatgtgaaccacaagcctagcaacaccaaggtggacgacaaggtggaacccaagagctgcgacaagacccacacctgtcctccatgtcctgctccagaactgctggccggaccttccgtgttcctgtttcctccaaagcctaaggacaccctgatgatcagcagaacccctgaagtgacctgcgtggtggtggatgtgtctcacgaggaccccgaagtgaagttcaattggtacgtggacggcgtggaagtgcacaatgccaagaccaagcctagagaggaacagtacaacagcacctacagagtggtgtccgtgctgaccgtgctgcaccaggattggctgaacggcaaagagtacaagtgcaaggtgtccaacaaggccctgcctctgcctgaggaaaagaccatcagcaaggccaagggccagcctagggaaccccaggtttacacactgcctccaagccgcgacgaactgaccaagaaccaggtgtccctgacctgcctcgtgaagggcttctacccttccgatatcgccgtggaatgggagagcaatggccagcctgagaacaactacaagacaacccctcctgtgctggacagcgacggctcattcttcctgtacagcaagctgaccgtggacaagtccagatggcagcagggcaacgtgttcagctgtagcgtgctgcacgaagccctgcacagccactacacccagaaaagcctgtctctgagccccggcaaatgataa

SEQ ID NO: 445 - RNA, 1476 nt, synthetic construct
  source 1..1476: mol_type = other RNA
atggattggatctggcgcatcctgtttctcgtgggagctgccacaggcgcccactctcaagttcacctgacacagtctggccccgaagtgcggaagcctggcacaagcgtgaaggtgtcctgtaaagcccctggcaacaccctgaaaacctacgacctgcactgggtccgatctgtgcctggacaaggactgcagtggatgggctggattagccacgagggcgacaagaaagtgatcgtggaacggttcaaggccaaagtgaccatcgactgggacagaagcaccaacaccgcctacctgcagctgagcggactgacatctggcgataccgccgtgtactactgtgccaagggcagcaagcaccggctgagagattacgccctgtacgacgatgacggcgccctgaattgggccgtcgatgtggactacctgagcaacctggaattctggggccagggaacagccgtgacagtgtctagtgcttccacaaagggccctagcgtgttccctctggctcctagcagcaagtctacaagcggaggaacagctgccctgggctgcctggtggaagattactttcctgagcctgtgaccgtgtcctggaacagcggtgctctgacttctggcgtgcacacctttccagccgtgctgcaaagcagcggcctgtactctctgagcagcgtggtcacagtgccaagctctagcctgggcacccagacctacatctgcaatgtgaaccacaagcctagcaacaccaaggtggacgacaaggtggaacccaagagctgcgacaagacccacacctgtcctccatgtcctgctccagaactgctggccggaccttccgtgttcctgtttcctccaaagcctaaggacaccctgatgatcagcagaacccctgaagtgacctgcgtggtggtggatgtgtctcacgaggaccctgaagtgaagttcaattggtacgtggacggcgtggaagtgcacaacgccaagaccaagcctagagaggaacagtacaacagcacctacagagtggtgtccgtgctgaccgtgctgcaccaggattggctgaacggcaaagagtacaagtgcaaggtgtccaacaaggccctgcctgcccctgaggaaaagaccatcagcaaggccaagggccagcctagggaaccccaggtttacacactgcctccaagccgcgacgaactgaccaagaaccaggtgtccctgacctgcctcgtgaagggcttctacccttccgatatcgccgtggaatgggagagcaatggccagcctgagaacaactacaagacaacccctcctgtgctggacagcgacggctcattcttcctgtacagcaagctgaccgtggacaagtccagatggcagcagggcaacgtgttcagctgtagcgtgctgcacgaagccctgcacagccactacacccagaaaagcctgtctctgagccccggcaaatgataa

SEQ ID NO: 446 - RNA, 1476 nt, synthetic construct
  source 1..1476: mol_type = other RNA
atggattggatctggcgcatcctgtttctcgtgggagctgccacaggcgcccactctcaagttcacctgacacagtctggccccgaagtgcggaagcctggcacaagcgtgaaggtgtcctgtaaagcccctggcaacaccctgaaaacctacgacctgcactgggtccgatctgtgcctggacaaggactgcagtggatgggctggattagccacgagggcgacaagaaagtgatcgtggaacggttcaaggccaaagtgaccatcgactgggacagaagcaccaacaccgcctacctgcagctgagcggactgacatctggcgataccgccgtgtactactgtgccaagggcagcaagcaccggctgagagattacgccctgtacgacgatgacggcgccctgaattgggccgtcgatgtggactacctgagcaacctggaattctggggccagggaacagccgtgacagtgtctagtgcttccacaaagggccctagcgtgttccctctggctcctagcagcaagtctacaagcggaggaacagctgccctgggctgcctggtggaagattactttcctgagcctgtgaccgtgtcctggaacagcggtgctctgacttctggcgtgcacacctttccagccgtgctgcaaagcagcggcctgtactctctgagcagcgtggtcacagtgccaagctctagcctgggcacccagacctacatctgcaatgtgaaccacaagcctagcaacaccaaggtggacgacaaggtggaacccaagagctgcgacaagacccacacctgtcctccatgtcctgctccagaactgctggccggaccttccgtgttcctgtttcctccaaagcctaaggacaccctgatgatcagcagaacccctgaagtgacctgcgtggtggtggatgtgtctcacgaggaccctgaagtgaagttcaattggtacgtggacggcgtggaagtgcacaacgccaagaccaagcctagagaggaacagtacaacagcacctacagagtggtgtccgtgctgaccgtgctgcaccaggattggctgaacggcaaagagtacaagtgcaaggtgtccaacaaggccctgcctgcccctatcgaaaagaccatcagcaaggccaagggccagcctagggaaccccaggtttacacactgcctccaagccgcgacgaactgaccaagaaccaggtgtccctgacctgcctcgtgaagggcttctacccttccgatatcgccgtggaatgggagagcaatggccagcctgagaacaactacaagacaacccctcctgtgctggacagcgacggctcattcttcctgtacagcaagctgaccgtggacaagtccagatggcagcagggcaacgtgttcagctgtagcgtgctgcacgaagccctgcacagccactacacccagaaaagcctgtctctgagccccggcaaatgataa

SEQ ID NO: 447 - RNA, 1476 nt, synthetic construct
  source 1..1476: mol_type = other RNA
atggattggatctggcgcatcctgtttctcgtgggagctgccacaggcgcccactctcaagttcacctgacacagtctggccccgaagtgcggaagcctggcacaagcgtgaaggtgtcctgtaaagcccctggcaacaccctgaaaacctacgacctgcactgggtccgatctgtgcctggacaaggactgcagtggatgggctggattagccacgagggcgacaagaaagtgatcgtggaacggttcaaggccaaagtgaccatcgactgggacagaagcaccaacaccgcctacctgcagctgagcggactgacatctggcgataccgccgtgtactactgtgccaagggcagcaagcaccggctgagagattacgccctgtacgacgatgacggcgccctgaattgggccgtcgatgtggactacctgagcaacctggaattctggggccagggaacagccgtgacagtgtctagtgcttccacaaagggccctagcgtgttccctctggctcctagcagcaagtctacaagcggaggaacagctgccctgggctgcctggtggaagattactttcctgagcctgtgaccgtgtcctggaacagcggtgctctgacttctggcgtgcacacctttccagccgtgctgcaaagcagcggcctgtactctctgagcagcgtggtcacagtgccaagctctagcctgggcacccagacctacatctgcaatgtgaaccacaagcctagcaacaccaaggtggacgacaaggtggaacccaagagctgcgacaagacccacacctgtcctccatgtcctgctccagaactgctgggcggaccttccgtgttcctgtttcctccaaagcctaaggacaccctgatgatcagcagaacccctgaagtgacctgcgtggtggtggatgtgtctcacgaggaccctgaagtgaagttcaattggtacgtggacggcgtggaagtgcacaacgccaagaccaagcctagagaggaacagtacaacagcacctacagagtggtgtccgtgctgaccgtgctgcaccaggattggctgaacggcaaagagtacaagtgcaaggtgtccaacaaggccctgcctgcccctgaggaaaagaccatcagcaaggccaagggccagcctagggaaccccaggtttacacactgcctccaagccgcgacgaactgaccaagaaccaggtgtccctgacctgcctcgtgaagggcttctacccttccgatatcgccgtggaatgggagagcaatggccagcctgagaacaactacaagacaacccctcctgtgctggacagcgacggctcattcttcctgtacagcaagctgaccgtggacaagtccagatggcagcagggcaacgtgttcagctgtagcgtgctgcacgaagccctgcacagccactacacccagaaaagcctgtctctgagccccggcaaatgataa

SEQ ID NO: 448 - RNA, 1476 nt, synthetic construct
  source 1..1476: mol_type = other RNA
atggattggatctggcgcatcctgtttctcgtgggagctgccacaggcgcccactctcaagttcacctgacacagtctggccccgaagtgcggaagcctggcacaagcgtgaaggtgtcctgtaaagcccctggcaacaccctgaaaacctacgacctgcactgggtccgatctgtgcctggacaaggactgcagtggatgggctggattagccacgagggcgacaagaaagtgatcgtggaacggttcaaggccaaagtgaccatcgactgggacagaagcaccaacaccgcctacctgcagctgagcggactgacatctggcgataccgccgtgtactactgtgccaagggcagcaagcaccggctgagagattacgccctgtacgacgatgacggcgccctgaattgggccgtcgatgtggactacctgagcaacctggaattctggggccagggaacagccgtgacagtgtctagtgcttccacaaagggccctagcgtgttccctctggctcctagcagcaagtctacaagcggaggaacagctgccctgggctgcctggtggaagattactttcctgagcctgtgaccgtgtcctggaacagcggtgctctgacttctggcgtgcacacctttccagccgtgctgcaaagcagcggcctgtactctctgagcagcgtggtcacagtgccaagctctagcctgggcacccagacctacatctgcaatgtgaaccacaagcctagcaacaccaaggtggacgacaaggtggaacccaagagctgcgacaagacccacacctgtcctccatgtcctgctccagaactgctcggcggaccttccgtgttcctgtttcctccaaagcctaaggacaccctgatgatcagcagaacccctgaagtgacctgcgtggtggtggatgtgtctcacgaggaccccgaagtgaagttcaattggtacgtggacggcgtggaagtgcacaacgccaagaccaagcctagagaggaacagtacaacagcacctacagagtggtgtccgtgctgacagtgctgcaccaggattggctgaacggcaaagagtacaagtgcaaggtgtccaacaaggccctgcctgctcctatcgagaaaaccatcagcaaggccaagggccagcctcgcgaacctcaagtctgtacactgcctcctagccgcgacgaactgaccaagaaccaggtgtccctgagctgcgccgtgaagggcttttacccttccgatatcgccgtggaatgggagagcaatggccagcctgagaacaactacaagacaacccctcctgtgctggacagcgacggctcattcttcctggtgtccaagctgacagtggacaagagcagatggcagcagggcaacgtgttcagctgcagcgtgctgcatgaagccctgcacagccactacacccagaagtccctgtctctgagccccggcaagtgataa

SEQ ID NO: 449 - RNA, 1476 nt, synthetic construct
  source 1..1476: mol_type = other RNA
atggattggatctggcgcatcctgtttctcgtgggagctgccacaggcgcccactctcaagttcacctgacacagtctggccccgaagtgcggaagcctggcacaagcgtgaaggtgtcctgtaaagcccctggcaacaccctgaaaacctacgacctgcactgggtccgatctgtgcctggacaaggactgcagtggatgggctggattagccacgagggcgacaagaaagtgatcgtggaacggttcaaggccaaagtgaccatcgactgggacagaagcaccaacaccgcctacctgcagctgagcggactgacatctggcgataccgccgtgtactactgtgccaagggcagcaagcaccggctgagagattacgccctgtacgacgatgacggcgccctgaattgggccgtcgatgtggactacctgagcaacctggaattctggggccagggaacagccgtgacagtgtctagtgcttccacaaagggccctagcgtgttccctctggctcctagcagcaagtctacaagcggaggaacagctgccctgggctgcctggtggaagattactttcctgagcctgtgaccgtgtcctggaacagcggtgctctgacttctggcgtgcacacctttccagccgtgctgcaaagcagcggcctgtactctctgagcagcgtggtcacagtgccaagctctagcctgggcacccagacctacatctgcaatgtgaaccacaagcctagcaacaccaaggtggacgacaaggtggaacccaagagctgcgacaagacccacacctgtcctccatgtcctgctccagaactgctggccggaccttccgtgttcctgtttcctccaaagcctaaggacaccctgatgatcagcagaacccctgaagtgacctgcgtggtggtggatgtgtctcacgaggaccccgaagtgaagttcaattggtacgtggacggcgtggaagtgcacaatgccaagaccaagcctagagaggaacagtacaacagcacctacagagtggtgtccgtgctgaccgtgctgcaccaggattggctgaacggcaaagagtacaagtgcaaggtgtccaacaaggccctgcctctgcctgaggaaaagaccatcagcaaggccaagggccagcctcgcgaacctcaagtctgtacactgcctcctagccgcgacgaactgaccaagaaccaggtgtccctgagctgcgccgtgaagggcttttacccttccgatatcgccgtggaatgggagagcaatggccagcctgagaacaactacaagacaacccctcctgtgctggacagcgacggctcattcttcctggtgtccaagctgacagtggacaagagcagatggcagcagggcaacgtgttcagctgcagcgtgctgcatgaagccctgcacagccactacacccagaagtccctgtctctgagccccggcaagtgataa

SEQ ID NO: 450 - RNA, 1476 nt, synthetic construct
  source 1..1476: mol_type = other RNA
atggattggatctggcgcatcctgtttctcgtgggagctgccacaggcgcccactctcaagttcacctgacacagtctggccccgaagtgcggaagcctggcacaagcgtgaaggtgtcctgtaaagcccctggcaacaccctgaaaacctacgacctgcactgggtccgatctgtgcctggacaaggactgcagtggatgggctggattagccacgagggcgacaagaaagtgatcgtggaacggttcaaggccaaagtgaccatcgactgggacagaagcaccaacaccgcctacctgcagctgagcggactgacatctggcgataccgccgtgtactactgtgccaagggcagcaagcaccggctgagagattacgccctgtacgacgatgacggcgccctgaattgggccgtcgatgtggactacctgagcaacctggaattctggggccagggaacagccgtgacagtgtctagtgcttccacaaagggccctagcgtgttccctctggctcctagcagcaagtctacaagcggaggaacagctgccctgggctgcctggtggaagattactttcctgagcctgtgaccgtgtcctggaacagcggtgctctgacttctggcgtgcacacctttccagccgtgctgcaaagcagcggcctgtactctctgagcagcgtggtcacagtgccaagctctagcctgggcacccagacctacatctgcaatgtgaaccacaagcctagcaacaccaaggtggacgacaaggtggaacccaagagctgcgacaagacccacacctgtcctccatgtcctgctccagaactgctggccggaccttccgtgttcctgtttcctccaaagcctaaggacaccctgatgatcagcagaacccctgaagtgacctgcgtggtggtggatgtgtctcacgaggaccctgaagtgaagttcaattggtacgtggacggcgtggaagtgcacaacgccaagaccaagcctagagaggaacagtacaacagcacctacagagtggtgtccgtgctgaccgtgctgcaccaggattggctgaacggcaaagagtacaagtgcaaggtgtccaacaaggccctgcctgcccctgaggaaaagaccatcagcaaggccaagggccagcctcgcgaacctcaagtctgtacactgcctcctagccgcgacgaactgaccaagaaccaggtgtccctgagctgcgccgtgaagggcttttacccttccgatatcgccgtggaatgggagagcaatggccagcctgagaacaactacaagacaacccctcctgtgctggacagcgacggctcattcttcctggtgtccaagctgacagtggacaagagcagatggcagcagggcaacgtgttcagctgcagcgtgctgcatgaagccctgcacagccactacacccagaagtccctgtctctgagccccggcaagtgataa

SEQ ID NO: 451 - RNA, 1476 nt, synthetic construct
  source 1..1476: mol_type = other RNA
atggattggatctggcgcatcctgtttctcgtgggagctgccacaggcgcccactctcaagttcacctgacacagtctggccccgaagtgcggaagcctggcacaagcgtgaaggtgtcctgtaaagcccctggcaacaccctgaaaacctacgacctgcactgggtccgatctgtgcctggacaaggactgcagtggatgggctggattagccacgagggcgacaagaaagtgatcgtggaacggttcaaggccaaagtgaccatcgactgggacagaagcaccaacaccgcctacctgcagctgagcggactgacatctggcgataccgccgtgtactactgtgccaagggcagcaagcaccggctgagagattacgccctgtacgacgatgacggcgccctgaattgggccgtcgatgtggactacctgagcaacctggaattctggggccagggaacagccgtgacagtgtctagtgcttccacaaagggccctagcgtgttccctctggctcctagcagcaagtctacaagcggaggaacagctgccctgggctgcctggtggaagattactttcctgagcctgtgaccgtgtcctggaacagcggtgctctgacttctggcgtgcacacctttccagccgtgctgcaaagcagcggcctgtactctctgagcagcgtggtcacagtgccaagctctagcctgggcacccagacctacatctgcaatgtgaaccacaagcctagcaacaccaaggtggacgacaaggtggaacccaagagctgcgacaagacccacacctgtcctccatgtcctgctccagaactgctggccggaccttccgtgttcctgtttcctccaaagcctaaggacaccctgatgatcagcagaacccctgaagtgacctgcgtggtggtggatgtgtctcacgaggaccctgaagtgaagttcaattggtacgtggacggcgtggaagtgcacaacgccaagaccaagcctagagaggaacagtacaacagcacctacagagtggtgtccgtgctgaccgtgctgcaccaggattggctgaacggcaaagagtacaagtgcaaggtgtccaacaaggccctgcctgcccctatcgaaaagaccatcagcaaggccaagggccagcctcgcgaacctcaagtctgtacactgcctcctagccgcgacgaactgaccaagaaccaggtgtccctgagctgcgccgtgaagggcttttacccttccgatatcgccgtggaatgggagagcaatggccagcctgagaacaactacaagacaacccctcctgtgctggacagcgacggctcattcttcctggtgtccaagctgacagtggacaagagcagatggcagcagggcaacgtgttcagctgcagcgtgctgcatgaagccctgcacagccactacacccagaagtccctgtctctgagccccggcaagtgataa

SEQ ID NO: 452 - RNA, 1476 nt, synthetic construct
  source 1..1476: mol_type = other RNA
atggattggatctggcgcatcctgtttctcgtgggagctgccacaggcgcccactctcaagttcacctgacacagtctggccccgaagtgcggaagcctggcacaagcgtgaaggtgtcctgtaaagcccctggcaacaccctgaaaacctacgacctgcactgggtccgatctgtgcctggacaaggactgcagtggatgggctggattagccacgagggcgacaagaaagtgatcgtggaacggttcaaggccaaagtgaccatcgactgggacagaagcaccaacaccgcctacctgcagctgagcggactgacatctggcgataccgccgtgtactactgtgccaagggcagcaagcaccggctgagagattacgccctgtacgacgatgacggcgccctgaattgggccgtcgatgtggactacctgagcaacctggaattctggggccagggaacagccgtgacagtgtctagtgcttccacaaagggccctagcgtgttccctctggctcctagcagcaagtctacaagcggaggaacagctgccctgggctgcctggtggaagattactttcctgagcctgtgaccgtgtcctggaacagcggtgctctgacttctggcgtgcacacctttccagccgtgctgcaaagcagcggcctgtactctctgagcagcgtggtcacagtgccaagctctagcctgggcacccagacctacatctgcaatgtgaaccacaagcctagcaacaccaaggtggacgacaaggtggaacccaagagctgcgacaagacccacacctgtcctccatgtcctgctccagaactgctgggcggaccttccgtgttcctgtttcctccaaagcctaaggacaccctgatgatcagcagaacccctgaagtgacctgcgtggtggtggatgtgtctcacgaggaccctgaagtgaagttcaattggtacgtggacggcgtggaagtgcacaacgccaagaccaagcctagagaggaacagtacaacagcacctacagagtggtgtccgtgctgaccgtgctgcaccaggattggctgaacggcaaagagtacaagtgcaaggtgtccaacaaggccctgcctgcccctgaggaaaagaccatcagcaaggccaagggccagcctcgcgaacctcaagtctgtacactgcctcctagccgcgacgaactgaccaagaaccaggtgtccctgagctgcgccgtgaagggcttttacccttccgatatcgccgtggaatgggagagcaatggccagcctgagaacaactacaagacaacccctcctgtgctggacagcgacggctcattcttcctggtgtccaagctgacagtggacaagagcagatggcagcagggcaacgtgttcagctgcagcgtgctgcatgaagccctgcacagccactacacccagaagtccctgtctctgagccccggcaagtgataa

SEQ ID NO: 453 - RNA, 1476 nt, synthetic construct
  source 1..1476: mol_type = other RNA
atggattggatctggcgcatcctgtttctcgtgggagctgccacaggcgcccactctcaagttcacctgacacagtctggccccgaagtgcggaagcctggcacaagcgtgaaggtgtcctgtaaagcccctggcaacaccctgaaaacctacgacctgcactgggtccgatctgtgcctggacaaggactgcagtggatgggctggattagccacgagggcgacaagaaagtgatcgtggaacggttcaaggccaaagtgaccatcgactgggacagaagcaccaacaccgcctacctgcagctgagcggactgacatctggcgataccgccgtgtactactgtgccaagggcagcaagcaccggctgagagattacgccctgtacgacgatgacggcgccctgaattgggccgtcgatgtggactacctgagcaacctggaattctggggccagggaacagccgtgacagtgtctagtgcttccacaaagggccctagcgtgttccctctggctcctagcagcaagtctacaagcggaggaacagctgccctgggctgcctggtggaagattactttcctgagcctgtgaccgtgtcctggaacagcggtgctctgacttctggcgtgcacacctttccagccgtgctgcaaagcagcggcctgtactctctgagcagcgtggtcacagtgccaagctctagcctgggcacccagacctacatctgcaatgtgaaccacaagcctagcaacaccaaggtggacgacaaggtggaacccaagagctgcgacaagacccacacctgtcctccatgtcctgctccagaactgctcggcggaccttccgtgttcctgtttcctccaaagcctaaggacaccctgatgatcagcagaacccctgaagtgacctgcgtggtggtggatgtgtctcacgaggaccccgaagtgaagttcaattggtacgtggacggcgtggaagtgcacaacgccaagaccaagcctagagaggaacagtacaacagcacctacagagtggtgtccgtgctgacagtgctgcaccaggattggctgaacggcaaagagtacaagtgcaaggtgtccaacaaggccctgcctgctcctatcgagaaaaccatcagcaaggccaagggccagcctagggaaccccaggtttacaccctgcctccatgccgcgacgaactgaccaagaaccaggtgtccctgtggtgcctggtcaagggcttctacccttccgatatcgccgtggaatgggagagcaatggccagcctgagaacaactacaagacaacccctcctgtgctggacagcgacggctcattcttcctgtacagcaagctgacagtggacaagagcagatggcagcagggcaacgtgttcagctgcagcgtgctgcatgaagccctgcacagccactacacccagaagtccctgtctctgagccccggcaagtgataa

SEQ ID NO: 454 - RNA, 1476 nt, synthetic construct
  source 1..1476: mol_type = other RNA
atggattggatctggcgcatcctgtttctcgtgggagctgccacaggcgcccactctcaagttcacctgacacagtctggccccgaagtgcggaagcctggcacaagcgtgaaggtgtcctgtaaagcccctggcaacaccctgaaaacctacgacctgcactgggtccgatctgtgcctggacaaggactgcagtggatgggctggattagccacgagggcgacaagaaagtgatcgtggaacggttcaaggccaaagtgaccatcgactgggacagaagcaccaacaccgcctacctgcagctgagcggactgacatctggcgataccgccgtgtactactgtgccaagggcagcaagcaccggctgagagattacgccctgtacgacgatgacggcgccctgaattgggccgtcgatgtggactacctgagcaacctggaattctggggccagggaacagccgtgacagtgtctagtgcttccacaaagggccctagcgtgttccctctggctcctagcagcaagtctacaagcggaggaacagctgccctgggctgcctggtggaagattactttcctgagcctgtgaccgtgtcctggaacagcggtgctctgacttctggcgtgcacacctttccagccgtgctgcaaagcagcggcctgtactctctgagcagcgtggtcacagtgccaagctctagcctgggcacccagacctacatctgcaatgtgaaccacaagcctagcaacaccaaggtggacgacaaggtggaacccaagagctgcgacaagacccacacctgtcctccatgtcctgctccagaactgctggccggaccttccgtgttcctgtttcctccaaagcctaaggacaccctgatgatcagcagaacccctgaagtgacctgcgtggtggtggatgtgtctcacgaggaccccgaagtgaagttcaattggtacgtggacggcgtggaagtgcacaatgccaagaccaagcctagagaggaacagtacaacagcacctacagagtggtgtccgtgctgaccgtgctgcaccaggattggctgaacggcaaagagtacaagtgcaaggtgtccaacaaggccctgcctctgcctgaggaaaagaccatcagcaaggccaagggccagcctagggaaccccaggtttacaccctgcctccatgccgcgacgaactgaccaagaaccaggtgtccctgtggtgcctggtcaagggcttctacccttccgatatcgccgtggaatgggagagcaatggccagcctgagaacaactacaagacaacccctcctgtgctggacagcgacggctcattcttcctgtacagcaagctgacagtggacaagagcagatggcagcagggcaacgtgttcagctgcagcgtgctgcatgaagccctgcacagccactacacccagaagtccctgtctctgagccccggcaagtgataa

SEQ ID NO: 455 - RNA, 1476 nt, synthetic construct
  source 1..1476: mol_type = other RNA
atggattggatctggcgcatcctgtttctcgtgggagctgccacaggcgcccactctcaagttcacctgacacagtctggccccgaagtgcggaagcctggcacaagcgtgaaggtgtcctgtaaagcccctggcaacaccctgaaaacctacgacctgcactgggtccgatctgtgcctggacaaggactgcagtggatgggctggattagccacgagggcgacaagaaagtgatcgtggaacggttcaaggccaaagtgaccatcgactgggacagaagcaccaacaccgcctacctgcagctgagcggactgacatctggcgataccgccgtgtactactgtgccaagggcagcaagcaccggctgagagattacgccctgtacgacgatgacggcgccctgaattgggccgtcgatgtggactacctgagcaacctggaattctggggccagggaacagccgtgacagtgtctagtgcttccacaaagggccctagcgtgttccctctggctcctagcagcaagtctacaagcggaggaacagctgccctgggctgcctggtggaagattactttcctgagcctgtgaccgtgtcctggaacagcggtgctctgacttctggcgtgcacacctttccagccgtgctgcaaagcagcggcctgtactctctgagcagcgtggtcacagtgccaagctctagcctgggcacccagacctacatctgcaatgtgaaccacaagcctagcaacaccaaggtggacgacaaggtggaacccaagagctgcgacaagacccacacctgtcctccatgtcctgctccagaactgctggccggaccttccgtgttcctgtttcctccaaagcctaaggacaccctgatgatcagcagaacccctgaagtgacctgcgtggtggtggatgtgtctcacgaggaccctgaagtgaagttcaattggtacgtggacggcgtggaagtgcacaacgccaagaccaagcctagagaggaacagtacaacagcacctacagagtggtgtccgtgctgaccgtgctgcaccaggattggctgaacggcaaagagtacaagtgcaaggtgtccaacaaggccctgcctgcccctgaggaaaagaccatcagcaaggccaagggccagcctagggaaccccaggtttacaccctgcctccatgccgcgacgaactgaccaagaaccaggtgtccctgtggtgcctggtcaagggcttctacccttccgatatcgccgtggaatgggagagcaatggccagcctgagaacaactacaagacaacccctcctgtgctggacagcgacggctcattcttcctgtacagcaagctgacagtggacaagagcagatggcagcagggcaacgtgttcagctgcagcgtgctgcatgaagccctgcacagccactacacccagaagtccctgtctctgagccccggcaagtgataa

SEQ ID NO: 456 - RNA, 1476 nt, synthetic construct
  source 1..1476: mol_type = other RNA
atggattggatctggcgcatcctgtttctcgtgggagctgccacaggcgcccactctcaagttcacctgacacagtctggccccgaagtgcggaagcctggcacaagcgtgaaggtgtcctgtaaagcccctggcaacaccctgaaaacctacgacctgcactgggtccgatctgtgcctggacaaggactgcagtggatgggctggattagccacgagggcgacaagaaagtgatcgtggaacggttcaaggccaaagtgaccatcgactgggacagaagcaccaacaccgcctacctgcagctgagcggactgacatctggcgataccgccgtgtactactgtgccaagggcagcaagcaccggctgagagattacgccctgtacgacgatgacggcgccctgaattgggccgtcgatgtggactacctgagcaacctggaattctggggccagggaacagccgtgacagtgtctagtgcttccacaaagggccctagcgtgttccctctggctcctagcagcaagtctacaagcggaggaacagctgccctgggctgcctggtggaagattactttcctgagcctgtgaccgtgtcctggaacagcggtgctctgacttctggcgtgcacacctttccagccgtgctgcaaagcagcggcctgtactctctgagcagcgtggtcacagtgccaagctctagcctgggcacccagacctacatctgcaatgtgaaccacaagcctagcaacaccaaggtggacgacaaggtggaacccaagagctgcgacaagacccacacctgtcctccatgtcctgctccagaactgctggccggaccttccgtgttcctgtttcctccaaagcctaaggacaccctgatgatcagcagaacccctgaagtgacctgcgtggtggtggatgtgtctcacgaggaccctgaagtgaagttcaattggtacgtggacggcgtggaagtgcacaacgccaagaccaagcctagagaggaacagtacaacagcacctacagagtggtgtccgtgctgaccgtgctgcaccaggattggctgaacggcaaagagtacaagtgcaaggtgtccaacaaggccctgcctgcccctatcgaaaagaccatcagcaaggccaagggccagcctagggaaccccaggtttacaccctgcctccatgccgcgacgaactgaccaagaaccaggtgtccctgtggtgcctggtcaagggcttctacccttccgatatcgccgtggaatgggagagcaatggccagcctgagaacaactacaagacaacccctcctgtgctggacagcgacggctcattcttcctgtacagcaagctgacagtggacaagagcagatggcagcagggcaacgtgttcagctgcagcgtgctgcatgaagccctgcacagccactacacccagaagtccctgtctctgagccccggcaagtgataa

SEQ ID NO: 457 - RNA, 1476 nt, synthetic construct
  source 1..1476: mol_type = other RNA
atggattggatctggcgcatcctgtttctcgtgggagctgccacaggcgcccactctcaagttcacctgacacagtctggccccgaagtgcggaagcctggcacaagcgtgaaggtgtcctgtaaagcccctggcaacaccctgaaaacctacgacctgcactgggtccgatctgtgcctggacaaggactgcagtggatgggctggattagccacgagggcgacaagaaagtgatcgtggaacggttcaaggccaaagtgaccatcgactgggacagaagcaccaacaccgcctacctgcagctgagcggactgacatctggcgataccgccgtgtactactgtgccaagggcagcaagcaccggctgagagattacgccctgtacgacgatgacggcgccctgaattgggccgtcgatgtggactacctgagcaacctggaattctggggccagggaacagccgtgacagtgtctagtgcttccacaaagggccctagcgtgttccctctggctcctagcagcaagtctacaagcggaggaacagctgccctgggctgcctggtggaagattactttcctgagcctgtgaccgtgtcctggaacagcggtgctctgacttctggcgtgcacacctttccagccgtgctgcaaagcagcggcctgtactctctgagcagcgtggtcacagtgccaagctctagcctgggcacccagacctacatctgcaatgtgaaccacaagcctagcaacaccaaggtggacgacaaggtggaacccaagagctgcgacaagacccacacctgtcctccatgtcctgctccagaactgctgggcggaccttccgtgttcctgtttcctccaaagcctaaggacaccctgatgatcagcagaacccctgaagtgacctgcgtggtggtggatgtgtctcacgaggaccctgaagtgaagttcaattggtacgtggacggcgtggaagtgcacaacgccaagaccaagcctagagaggaacagtacaacagcacctacagagtggtgtccgtgctgaccgtgctgcaccaggattggctgaacggcaaagagtacaagtgcaaggtgtccaacaaggccctgcctgcccctgaggaaaagaccatcagcaaggccaagggccagcctagggaaccccaggtttacaccctgcctccatgccgcgacgaactgaccaagaaccaggtgtccctgtggtgcctggtcaagggcttctacccttccgatatcgccgtggaatgggagagcaatggccagcctgagaacaactacaagacaacccctcctgtgctggacagcgacggctcattcttcctgtacagcaagctgacagtggacaagagcagatggcagcagggcaacgtgttcagctgcagcgtgctgcatgaagccctgcacagccactacacccagaagtccctgtctctgagccccggcaagtgataa

SEQ ID NO: 458 - DNA, 1638 bp, synthetic construct
  source 1..1638: mol_type = other DNA
atggattggatctggcgcatcctgtttctcgtgggagctgccacaggcgcccactctcaagttcacctgacacagtctggccccgaagtgcggaagcctggcacaagcgtgaaggtgtcctgtaaagcccctggcaacaccctgaaaacctacgacctgcactgggtccgatctgtgcctggacaaggactgcagtggatgggctggattagccacgagggcgacaagaaagtgatcgtggaacggttcaaggccaaagtgaccatcgactgggacagaagcaccaacaccgcctacctgcagctgagcggactgacatctggcgataccgccgtgtactactgtgccaagggcagcaagcaccggctgagagattacgccctgtacgacgatgacggcgccctgaattgggccgtcgatgtggactacctgagcaacctggaattctggggccagggaacagccgtgacagtgtcttccggtggcggaggaagcggaggcggaggttcaggcggcggaggctctggcggtggtggatctgattttgtgctgacacagagccctcacagcctgagcgttacacctggcgagagcgccagcatcagctgcaagtctagccactctctgatccacggcgaccggaacaactacctggcttggtacgtgcagaagcccggcagatctcctcagctgctgatctacctggccagcagcagagctagcggcgtgccagatagattttctggcagcggcagcgacaaggatttcaccctgaagatctccagagtggaaaccgaggacgtgggcacctactactgtatgcagggcagagagagcccctggacatttggccagggcaccaaggtggacatcaaaggtggcggtggttctggcggaggcggaagtggcggcggtgggtccggaggtggtggatctgaacctaagagcagcgacaagacccacacctgtcctccatgtcctgctccagaactgctcggcggaccttccgtgttcctgtttcctccaaagcctaaggacaccctgatgatcagcagaacccctgaagtgacctgcgtggtggtggatgtgtctcacgaggaccccgaagtgaagttcaattggtacgtggacggcgtggaagtgcacaacgccaagaccaagcctagagaggaacagtacaacagcacctacagagtggtgtccgtgctgacagtgctgcaccaggattggctgaacggcaaagagtacaagtgcaaggtgtccaacaaggccctgcctgctcctatcgagaaaaccatcagcaaggccaagggccagcctagggaaccccaggtttacacactgcctccaagccgcgaggaaatgaccaagaaccaggtgtccctgacctgcctcgtgaagggcttctacccttccgatatcgccgtggaatgggagagcaatggccagcctgagaacaactacaagacaacccctcctgtgctggacagcgacggctcattcttcctgtacagcaagctgactgtggataagtcccggtggcagcagggcaacgtgttcagctgttctgtgatgcacgaagccctgcacaaccactacacccagaaaagcctgtctctgagccccggcaagtgataa

SEQ ID NO: 459 - DNA, 1638 bp, synthetic construct
  source 1..1638: mol_type = other DNA
atggattggatctggcgcatcctgtttctcgtgggagctgccacaggcgcccactctcaagttcacctgacacagtctggccccgaagtgcggaagcctggcacaagcgtgaaggtgtcctgtaaagcccctggcaacaccctgaaaacctacgacctgcactgggtccgatctgtgcctggacaaggactgcagtggatgggctggattagccacgagggcgacaagaaagtgatcgtggaacggttcaaggccaaagtgaccatcgactgggacagaagcaccaacaccgcctacctgcagctgagcggactgacatctggcgataccgccgtgtactactgtgccaagggcagcaagcaccggctgagagattacgccctgtacgacgatgacggcgccctgaattgggccgtcgatgtggactacctgagcaacctggaattctggggccagggaacagccgtgacagtgtcttccggtggcggaggaagcggaggcggaggttcaggcggcggaggctctggcggtggtggatctgattttgtgctgacacagagccctcacagcctgagcgttacacctggcgagagcgccagcatcagctgcaagtctagccactctctgatccacggcgaccggaacaactacctggcttggtacgtgcagaagcccggcagatctcctcagctgctgatctacctggccagcagcagagctagcggcgtgccagatagattttctggcagcggcagcgacaaggatttcaccctgaagatctccagagtggaaaccgaggacgtgggcacctactactgtatgcagggcagagagagcccctggacatttggccagggcaccaaggtggacatcaaaggtggcggtggttctggcggaggcggaagtggcggcggtgggtccggaggtggtggatctgaacctaagagcagcgacaagacccacacctgtcctccatgtcctgctccagaactgctcggcggaccttccgtgttcctgtttcctccaaagcctaaggacaccctgatgatcagcagaacccctgaagtgacctgcgtggtggtggatgtgtctcacgaggaccccgaagtgaagttcaattggtacgtggacggcgtggaagtgcacaacgccaagaccaagcctagagaggaacagtacaacagcacctacagagtggtgtccgtgctgacagtgctgcaccaggattggctgaacggcaaagagtacaagtgcaaggtgtccaacaaggccctgcctgctcctatcgagaaaaccatcagcaaggccaagggccagcctagggaaccccaggtttacacactgcctccaagccgcgaggaaatgaccaagaaccaggtgtccctgacctgcctcgtgaagggcttctacccttccgatatcgccgtggaatgggagagcaatggccagcctgagaacaactacaagacaacccctcctgtgctggacagcgacggctcattcttcctgtacagcaagctgaccgtggacaagtccagatggcagcagggcaacgtgttcagctgtagcgtgctgcacgaagccctgcacagccactacacccagaaaagcctgtctctgagccccggcaaatgataa

SEQ ID NO: 460 - DNA, 1638 bp, synthetic construct
  source 1..1638: mol_type = other DNA
atggattggatctggcgcatcctgtttctcgtgggagctgccacaggcgcccactctcaagttcacctgacacagtctggccccgaagtgcggaagcctggcacaagcgtgaaggtgtcctgtaaagcccctggcaacaccctgaaaacctacgacctgcactgggtccgatctgtgcctggacaaggactgcagtggatgggctggattagccacgagggcgacaagaaagtgatcgtggaacggttcaaggccaaagtgaccatcgactgggacagaagcaccaacaccgcctacctgcagctgagcggactgacatctggcgataccgccgtgtactactgtgccaagggcagcaagcaccggctgagagattacgccctgtacgacgatgacggcgccctgaattgggccgtcgatgtggactacctgagcaacctggaattctggggccagggaacagccgtgacagtgtcttccggtggcggaggaagcggaggcggaggttcaggcggcggaggctctggcggtggtggatctgattttgtgctgacacagagccctcacagcctgagcgttacacctggcgagagcgccagcatcagctgcaagtctagccactctctgatccacggcgaccggaacaactacctggcttggtacgtgcagaagcccggcagatctcctcagctgctgatctacctggccagcagcagagctagcggcgtgccagatagattttctggcagcggcagcgacaaggatttcaccctgaagatctccagagtggaaaccgaggacgtgggcacctactactgtatgcagggcagagagagcccctggacatttggccagggcaccaaggtggacatcaaaggtggcggtggttctggcggaggcggaagtggcggcggtgggtccggaggtggtggatctgaacctaagagcagcgacaagacccacacctgtcctccatgtcctgctccagaactgctggccggaccttccgtgttcctgtttcctccaaagcctaaggacaccctgatgatcagcagaacccctgaagtgacctgcgtggtggtggatgtgtctcacgaggaccccgaagtgaagttcaattggtacgtggacggcgtggaagtgcacaatgccaagaccaagcctagagaggaacagtacaacagcacctacagagtggtgtccgtgctgaccgtgctgcaccaggattggctgaacggcaaagagtacaagtgcaaggtgtccaacaaggccctgcctctgcctgaggaaaagaccatcagcaaggccaagggccagcctagggaaccccaggtttacacactgcctccaagccgcgaggaaatgaccaagaaccaggtgtccctgacctgcctcgtgaagggcttctacccttccgatatcgccgtggaatgggagagcaatggccagcctgagaacaactacaagacaacccctcctgtgctggacagcgacggctcattcttcctgtacagcaagctgaccgtggacaagtccagatggcagcagggcaacgtgttcagctgtagcgtgctgcacgaagccctgcacagccactacacccagaaaagcctgtctctgagccccggcaaatgataa

SEQ ID NO: 461 - DNA, 1638 bp, synthetic construct
  source 1..1638: mol_type = other DNA
atggattggatctggcgcatcctgtttctcgtgggagctgccacaggcgcccactctcaagttcacctgacacagtctggccccgaagtgcggaagcctggcacaagcgtgaaggtgtcctgtaaagcccctggcaacaccctgaaaacctacgacctgcactgggtccgatctgtgcctggacaaggactgcagtggatgggctggattagccacgagggcgacaagaaagtgatcgtggaacggttcaaggccaaagtgaccatcgactgggacagaagcaccaacaccgcctacctgcagctgagcggactgacatctggcgataccgccgtgtactactgtgccaagggcagcaagcaccggctgagagattacgccctgtacgacgatgacggcgccctgaattgggccgtcgatgtggactacctgagcaacctggaattctggggccagggaacagccgtgacagtgtcttccggtggcggaggaagcggaggcggaggttcaggcggcggaggctctggcggtggtggatctgattttgtgctgacacagagccctcacagcctgagcgttacacctggcgagagcgccagcatcagctgcaagtctagccactctctgatccacggcgaccggaacaactacctggcttggtacgtgcagaagcccggcagatctcctcagctgctgatctacctggccagcagcagagctagcggcgtgccagatagattttctggcagcggcagcgacaaggatttcaccctgaagatctccagagtggaaaccgaggacgtgggcacctactactgtatgcagggcagagagagcccctggacatttggccagggcaccaaggtggacatcaaaggtggcggtggttctggcggaggcggaagtggcggcggtgggtccggaggtggtggatctgaacctaagagcagcgacaagacccacacctgtcctccatgtcctgctccagaactgctggccggaccttccgtgttcctgtttcctccaaagcctaaggacaccctgatgatcagcagaacccctgaagtgacctgcgtggtggtggatgtgtctcacgaggaccctgaagtgaagttcaattggtacgtggacggcgtggaagtgcacaacgccaagaccaagcctagagaggaacagtacaacagcacctacagagtggtgtccgtgctgaccgtgctgcaccaggattggctgaacggcaaagagtacaagtgcaaggtgtccaacaaggccctgcctgcccctgaggaaaagaccatcagcaaggccaagggccagcctagggaaccccaggtttacacactgcctccaagccgcgaggaaatgaccaagaaccaggtgtccctgacctgcctcgtgaagggcttctacccttccgatatcgccgtggaatgggagagcaatggccagcctgagaacaactacaagacaacccctcctgtgctggacagcgacggctcattcttcctgtacagcaagctgaccgtggacaagtccagatggcagcagggcaacgtgttcagctgtagcgtgctgcacgaagccctgcacagccactacacccagaaaagcctgtctctgagccccggcaaatgataa

SEQ ID NO: 462 - DNA, 1638 bp, synthetic construct
  source 1..1638: mol_type = other DNA
atggattggatctggcgcatcctgtttctcgtgggagctgccacaggcgcccactctcaagttcacctgacacagtctggccccgaagtgcggaagcctggcacaagcgtgaaggtgtcctgtaaagcccctggcaacaccctgaaaacctacgacctgcactgggtccgatctgtgcctggacaaggactgcagtggatgggctggattagccacgagggcgacaagaaagtgatcgtggaacggttcaaggccaaagtgaccatcgactgggacagaagcaccaacaccgcctacctgcagctgagcggactgacatctggcgataccgccgtgtactactgtgccaagggcagcaagcaccggctgagagattacgccctgtacgacgatgacggcgccctgaattgggccgtcgatgtggactacctgagcaacctggaattctggggccagggaacagccgtgacagtgtcttccggtggcggaggaagcggaggcggaggttcaggcggcggaggctctggcggtggtggatctgattttgtgctgacacagagccctcacagcctgagcgttacacctggcgagagcgccagcatcagctgcaagtctagccactctctgatccacggcgaccggaacaactacctggcttggtacgtgcagaagcccggcagatctcctcagctgctgatctacctggccagcagcagagctagcggcgtgccagatagattttctggcagcggcagcgacaaggatttcaccctgaagatctccagagtggaaaccgaggacgtgggcacctactactgtatgcagggcagagagagcccctggacatttggccagggcaccaaggtggacatcaaaggtggcggtggttctggcggaggcggaagtggcggcggtgggtccggaggtggtggatctgaacctaagagcagcgacaagacccacacctgtcctccatgtcctgctccagaactgctggccggaccttccgtgttcctgtttcctccaaagcctaaggacaccctgatgatcagcagaacccctgaagtgacctgcgtggtggtggatgtgtctcacgaggaccctgaagtgaagttcaattggtacgtggacggcgtggaagtgcacaacgccaagaccaagcctagagaggaacagtacaacagcacctacagagtggtgtccgtgctgaccgtgctgcaccaggattggctgaacggcaaagagtacaagtgcaaggtgtccaacaaggccctgcctgcccctatcgaaaagaccatcagcaaggccaagggccagcctagggaaccccaggtttacacactgcctccaagccgcgaggaaatgaccaagaaccaggtgtccctgacctgcctcgtgaagggcttctacccttccgatatcgccgtggaatgggagagcaatggccagcctgagaacaactacaagacaacccctcctgtgctggacagcgacggctcattcttcctgtacagcaagctgaccgtggacaagtccagatggcagcagggcaacgtgttcagctgtagcgtgctgcacgaagccctgcacagccactacacccagaaaagcctgtctctgagccccggcaaatgataa

SEQ ID NO: 463 - DNA, 1638 bp, synthetic construct
  source 1..1638: mol_type = other DNA
atggattggatctggcgcatcctgtttctcgtgggagctgccacaggcgcccactctcaagttcacctgacacagtctggccccgaagtgcggaagcctggcacaagcgtgaaggtgtcctgtaaagcccctggcaacaccctgaaaacctacgacctgcactgggtccgatctgtgcctggacaaggactgcagtggatgggctggattagccacgagggcgacaagaaagtgatcgtggaacggttcaaggccaaagtgaccatcgactgggacagaagcaccaacaccgcctacctgcagctgagcggactgacatctggcgataccgccgtgtactactgtgccaagggcagcaagcaccggctgagagattacgccctgtacgacgatgacggcgccctgaattgggccgtcgatgtggactacctgagcaacctggaattctggggccagggaacagccgtgacagtgtcttccggtggcggaggaagcggaggcggaggttcaggcggcggaggctctggcggtggtggatctgattttgtgctgacacagagccctcacagcctgagcgttacacctggcgagagcgccagcatcagctgcaagtctagccactctctgatccacggcgaccggaacaactacctggcttggtacgtgcagaagcccggcagatctcctcagctgctgatctacctggccagcagcagagctagcggcgtgccagatagattttctggcagcggcagcgacaaggatttcaccctgaagatctccagagtggaaaccgaggacgtgggcacctactactgtatgcagggcagagagagcccctggacatttggccagggcaccaaggtggacatcaaaggtggcggtggttctggcggaggcggaagtggcggcggtgggtccggaggtggtggatctgaacctaagagcagcgacaagacccacacctgtcctccatgtcctgctccagaactgctgggcggaccttccgtgttcctgtttcctccaaagcctaaggacaccctgatgatcagcagaacccctgaagtgacctgcgtggtggtggatgtgtctcacgaggaccctgaagtgaagttcaattggtacgtggacggcgtggaagtgcacaacgccaagaccaagcctagagaggaacagtacaacagcacctacagagtggtgtccgtgctgaccgtgctgcaccaggattggctgaacggcaaagagtacaagtgcaaggtgtccaacaaggccctgcctgcccctgaggaaaagaccatcagcaaggccaagggccagcctagggaaccccaggtttacacactgcctccaagccgcgaggaaatgaccaagaaccaggtgtccctgacctgcctcgtgaagggcttctacccttccgatatcgccgtggaatgggagagcaatggccagcctgagaacaactacaagacaacccctcctgtgctggacagcgacggctcattcttcctgtacagcaagctgaccgtggacaagtccagatggcagcagggcaacgtgttcagctgtagcgtgctgcacgaagccctgcacagccactacacccagaaaagcctgtctctgagccccggcaaatgataa

SEQ ID NO: 464 - DNA, 1638 bp, synthetic construct
  source 1..1638: mol_type = other DNA
atggattggatctggcgcatcctgtttctcgtgggagctgccacaggcgcccactctcaagttcacctgacacagtctggccccgaagtgcggaagcctggcacaagcgtgaaggtgtcctgtaaagcccctggcaacaccctgaaaacctacgacctgcactgggtccgatctgtgcctggacaaggactgcagtggatgggctggattagccacgagggcgacaagaaagtgatcgtggaacggttcaaggccaaagtgaccatcgactgggacagaagcaccaacaccgcctacctgcagctgagcggactgacatctggcgataccgccgtgtactactgtgccaagggcagcaagcaccggctgagagattacgccctgtacgacgatgacggcgccctgaattgggccgtcgatgtggactacctgagcaacctggaattctggggccagggaacagccgtgacagtgtcttccggtggcggaggaagcggaggcggaggttcaggcggcggaggctctggcggtggtggatctgattttgtgctgacacagagccctcacagcctgagcgttacacctggcgagagcgccagcatcagctgcaagtctagccactctctgatccacggcgaccggaacaactacctggcttggtacgtgcagaagcccggcagatctcctcagctgctgatctacctggccagcagcagagctagcggcgtgccagatagattttctggcagcggcagcgacaaggatttcaccctgaagatctccagagtggaaaccgaggacgtgggcacctactactgtatgcagggcagagagagcccctggacatttggccagggcaccaaggtggacatcaaaggtggcggtggttctggcggaggcggaagtggcggcggtgggtccggaggtggtggatctgaacctaagagcagcgacaagacccacacctgtcctccatgtcctgctccagaactgctcggcggaccttccgtgttcctgtttcctccaaagcctaaggacaccctgatgatcagcagaacccctgaagtgacctgcgtggtggtggatgtgtctcacgaggaccccgaagtgaagttcaattggtacgtggacggcgtggaagtgcacaacgccaagaccaagcctagagaggaacagtacaacagcacctacagagtggtgtccgtgctgacagtgctgcaccaggattggctgaacggcaaagagtacaagtgcaaggtgtccaacaaggccctgcctgctcctatcgagaaaaccatcagcaaggccaagggccagcctagggaaccccaagtctgtacactgcctcctagccgcgaggaaatgaccaagaaccaggtgtccctgagctgcgccgtgaagggcttttacccttccgatatcgccgtggaatgggagagcaatggccagcctgagaacaactacaagacaacccctcctgtgctggacagcgacggctcattcttcctggtgtccaagctgacagtggacaagagcagatggcagcagggcaacgtgttcagctgctctgtgctgcacgaagccctgcacagccactacacccagaagtccctgtctctgagccccggcaagtgataa

SEQ ID NO: 465 - DNA, 1638 bp, synthetic construct
  source 1..1638: mol_type = other DNA
atggattggatctggcgcatcctgtttctcgtgggagctgccacaggcgcccactctcaagttcacctgacacagtctggccccgaagtgcggaagcctggcacaagcgtgaaggtgtcctgtaaagcccctggcaacaccctgaaaacctacgacctgcactgggtccgatctgtgcctggacaaggactgcagtggatgggctggattagccacgagggcgacaagaaagtgatcgtggaacggttcaaggccaaagtgaccatcgactgggacagaagcaccaacaccgcctacctgcagctgagcggactgacatctggcgataccgccgtgtactactgtgccaagggcagcaagcaccggctgagagattacgccctgtacgacgatgacggcgccctgaattgggccgtcgatgtggactacctgagcaacctggaattctggggccagggaacagccgtgacagtgtcttccggtggcggaggaagcggaggcggaggttcaggcggcggaggctctggcggtggtggatctgattttgtgctgacacagagccctcacagcctgagcgttacacctggcgagagcgccagcatcagctgcaagtctagccactctctgatccacggcgaccggaacaactacctggcttggtacgtgcagaagcccggcagatctcctcagctgctgatctacctggccagcagcagagctagcggcgtgccagatagattttctggcagcggcagcgacaaggatttcaccctgaagatctccagagtggaaaccgaggacgtgggcacctactactgtatgcagggcagagagagcccctggacatttggccagggcaccaaggtggacatcaaaggtggcggtggttctggcggaggcggaagtggcggcggtgggtccggaggtggtggatctgaacctaagagcagcgacaagacccacacctgtcctccatgtcctgctccagaactgctggccggaccttccgtgttcctgtttcctccaaagcctaaggacaccctgatgatcagcagaacccctgaagtgacctgcgtggtggtggatgtgtctcacgaggaccccgaagtgaagttcaattggtacgtggacggcgtggaagtgcacaatgccaagaccaagcctagagaggaacagtacaacagcacctacagagtggtgtccgtgctgaccgtgctgcaccaggattggctgaacggcaaagagtacaagtgcaaggtgtccaacaaggccctgcctctgcctgaggaaaagaccatcagcaaggccaagggccagcctagggaaccccaagtctgtacactgcctcctagccgcgaggaaatgaccaagaaccaggtgtccctgagctgcgccgtgaagggcttttacccttccgatatcgccgtggaatgggagagcaatggccagcctgagaacaactacaagacaacccctcctgtgctggacagcgacggctcattcttcctggtgtccaagctgacagtggacaagagcagatggcagcagggcaacgtgttcagctgctctgtgctgcacgaagccctgcacagccactacacccagaagtccctgtctctgagccccggcaagtgataa

SEQ ID NO: 466 - DNA, 1638 bp, synthetic construct
  source 1..1638: mol_type = other DNA
atggattggatctggcgcatcctgtttctcgtgggagctgccacaggcgcccactctcaagttcacctgacacagtctggccccgaagtgcggaagcctggcacaagcgtgaaggtgtcctgtaaagcccctggcaacaccctgaaaacctacgacctgcactgggtccgatctgtgcctggacaaggactgcagtggatgggctggattagccacgagggcgacaagaaagtgatcgtggaacggttcaaggccaaagtgaccatcgactgggacagaagcaccaacaccgcctacctgcagctgagcggactgacatctggcgataccgccgtgtactactgtgccaagggcagcaagcaccggctgagagattacgccctgtacgacgatgacggcgccctgaattgggccgtcgatgtggactacctgagcaacctggaattctggggccagggaacagccgtgacagtgtcttccggtggcggaggaagcggaggcggaggttcaggcggcggaggctctggcggtggtggatctgattttgtgctgacacagagccctcacagcctgagcgttacacctggcgagagcgccagcatcagctgcaagtctagccactctctgatccacggcgaccggaacaactacctggcttggtacgtgcagaagcccggcagatctcctcagctgctgatctacctggccagcagcagagctagcggcgtgccagatagattttctggcagcggcagcgacaaggatttcaccctgaagatctccagagtggaaaccgaggacgtgggcacctactactgtatgcagggcagagagagcccctggacatttggccagggcaccaaggtggacatcaaaggtggcggtggttctggcggaggcggaagtggcggcggtgggtccggaggtggtggatctgaacctaagagcagcgacaagacccacacctgtcctccatgtcctgctccagaactgctggccggaccttccgtgttcctgtttcctccaaagcctaaggacaccctgatgatcagcagaacccctgaagtgacctgcgtggtggtggatgtgtctcacgaggaccctgaagtgaagttcaattggtacgtggacggcgtggaagtgcacaacgccaagaccaagcctagagaggaacagtacaacagcacctacagagtggtgtccgtgctgaccgtgctgcaccaggattggctgaacggcaaagagtacaagtgcaaggtgtccaacaaggccctgcctgcccctgaggaaaagaccatcagcaaggccaagggccagcctagggaaccccaagtctgtacactgcctcctagccgcgaggaaatgaccaagaaccaggtgtccctgagctgcgccgtgaagggcttttacccttccgatatcgccgtggaatgggagagcaatggccagcctgagaacaactacaagacaacccctcctgtgctggacagcgacggctcattcttcctggtgtccaagctgacagtggacaagagcagatggcagcagggcaacgtgttcagctgctctgtgctgcacgaagccctgcacagccactacacccagaagtccctgtctctgagccccggcaagtgataa

SEQ ID NO: 467 - DNA, 1638 bp, synthetic construct
  source 1..1638: mol_type = other DNA
atggattggatctggcgcatcctgtttctcgtgggagctgccacaggcgcccactctcaagttcacctgacacagtctggccccgaagtgcggaagcctggcacaagcgtgaaggtgtcctgtaaagcccctggcaacaccctgaaaacctacgacctgcactgggtccgatctgtgcctggacaaggactgcagtggatgggctggattagccacgagggcgacaagaaagtgatcgtggaacggttcaaggccaaagtgaccatcgactgggacagaagcaccaacaccgcctacctgcagctgagcggactgacatctggcgataccgccgtgtactactgtgccaagggcagcaagcaccggctgagagattacgccctgtacgacgatgacggcgccctgaattgggccgtcgatgtggactacctgagcaacctggaattctggggccagggaacagccgtgacagtgtcttccggtggcggaggaagcggaggcggaggttcaggcggcggaggctctggcggtggtggatctgattttgtgctgacacagagccctcacagcctgagcgttacacctggcgagagcgccagcatcagctgcaagtctagccactctctgatccacggcgaccggaacaactacctggcttggtacgtgcagaagcccggcagatctcctcagctgctgatctacctggccagcagcagagctagcggcgtgccagatagattttctggcagcggcagcgacaaggatttcaccctgaagatctccagagtggaaaccgaggacgtgggcacctactactgtatgcagggcagagagagcccctggacatttggccagggcaccaaggtggacatcaaaggtggcggtggttctggcggaggcggaagtggcggcggtgggtccggaggtggtggatctgaacctaagagcagcgacaagacccacacctgtcctccatgtcctgctccagaactgctggccggaccttccgtgttcctgtttcctccaaagcctaaggacaccctgatgatcagcagaacccctgaagtgacctgcgtggtggtggatgtgtctcacgaggaccctgaagtgaagttcaattggtacgtggacggcgtggaagtgcacaacgccaagaccaagcctagagaggaacagtacaacagcacctacagagtggtgtccgtgctgaccgtgctgcaccaggattggctgaacggcaaagagtacaagtgcaaggtgtccaacaaggccctgcctgcccctatcgaaaagaccatcagcaaggccaagggccagcctagggaaccccaagtctgtacactgcctcctagccgcgaggaaatgaccaagaaccaggtgtccctgagctgcgccgtgaagggcttttacccttccgatatcgccgtggaatgggagagcaatggccagcctgagaacaactacaagacaacccctcctgtgctggacagcgacggctcattcttcctggtgtccaagctgacagtggacaagagcagatggcagcagggcaacgtgttcagctgctctgtgctgcacgaagccctgcacagccactacacccagaagtccctgtctctgagccccggcaagtgataa

SEQ ID NO: 468 - DNA, 1638 bp, synthetic construct
  source 1..1638: mol_type = other DNA
atggattggatctggcgcatcctgtttctcgtgggagctgccacaggcgcccactctcaagttcacctgacacagtctggccccgaagtgcggaagcctggcacaagcgtgaaggtgtcctgtaaagcccctggcaacaccctgaaaacctacgacctgcactgggtccgatctgtgcctggacaaggactgcagtggatgggctggattagccacgagggcgacaagaaagtgatcgtggaacggttcaaggccaaagtgaccatcgactgggacagaagcaccaacaccgcctacctgcagctgagcggactgacatctggcgataccgccgtgtactactgtgccaagggcagcaagcaccggctgagagattacgccctgtacgacgatgacggcgccctgaattgggccgtcgatgtggactacctgagcaacctggaattctggggccagggaacagccgtgacagtgtcttccggtggcggaggaagcggaggcggaggttcaggcggcggaggctctggcggtggtggatctgattttgtgctgacacagagccctcacagcctgagcgttacacctggcgagagcgccagcatcagctgcaagtctagccactctctgatccacggcgaccggaacaactacctggcttggtacgtgcagaagcccggcagatctcctcagctgctgatctacctggccagcagcagagctagcggcgtgccagatagattttctggcagcggcagcgacaaggatttcaccctgaagatctccagagtggaaaccgaggacgtgggcacctactactgtatgcagggcagagagagcccctggacatttggccagggcaccaaggtggacatcaaaggtggcggtggttctggcggaggcggaagtggcggcggtgggtccggaggtggtggatctgaacctaagagcagcgacaagacccacacctgtcctccatgtcctgctccagaactgctgggcggaccttccgtgttcctgtttcctccaaagcctaaggacaccctgatgatcagcagaacccctgaagtgacctgcgtggtggtggatgtgtctcacgaggaccctgaagtgaagttcaattggtacgtggacggcgtggaagtgcacaacgccaagaccaagcctagagaggaacagtacaacagcacctacagagtggtgtccgtgctgaccgtgctgcaccaggattggctgaacggcaaagagtacaagtgcaaggtgtccaacaaggccctgcctgcccctgaggaaaagaccatcagcaaggccaagggccagcctagggaaccccaagtctgtacactgcctcctagccgcgaggaaatgaccaagaaccaggtgtccctgagctgcgccgtgaagggcttttacccttccgatatcgccgtggaatgggagagcaatggccagcctgagaacaactacaagacaacccctcctgtgctggacagcgacggctcattcttcctggtgtccaagctgacagtggacaagagcagatggcagcagggcaacgtgttcagctgctctgtgctgcacgaagccctgcacagccactacacccagaagtccctgtctctgagccccggcaagtgataa

SEQ ID NO: 469 - DNA, 1638 bp, synthetic construct
  source 1..1638: mol_type = other DNA
atggattggatctggcgcatcctgtttctcgtgggagctgccacaggcgcccactctcaagttcacctgacacagtctggccccgaagtgcggaagcctggcacaagcgtgaaggtgtcctgtaaagcccctggcaacaccctgaaaacctacgacctgcactgggtccgatctgtgcctggacaaggactgcagtggatgggctggattagccacgagggcgacaagaaagtgatcgtggaacggttcaaggccaaagtgaccatcgactgggacagaagcaccaacaccgcctacctgcagctgagcggactgacatctggcgataccgccgtgtactactgtgccaagggcagcaagcaccggctgagagattacgccctgtacgacgatgacggcgccctgaattgggccgtcgatgtggactacctgagcaacctggaattctggggccagggaacagccgtgacagtgtcttccggtggcggaggaagcggaggcggaggttcaggcggcggaggctctggcggtggtggatctgattttgtgctgacacagagccctcacagcctgagcgttacacctggcgagagcgccagcatcagctgcaagtctagccactctctgatccacggcgaccggaacaactacctggcttggtacgtgcagaagcccggcagatctcctcagctgctgatctacctggccagcagcagagctagcggcgtgccagatagattttctggcagcggcagcgacaaggatttcaccctgaagatctccagagtggaaaccgaggacgtgggcacctactactgtatgcagggcagagagagcccctggacatttggccagggcaccaaggtggacatcaaaggtggcggtggttctggcggaggcggaagtggcggcggtgggtccggaggtggtggatctgaacctaagagcagcgacaagacccacacctgtcctccatgtcctgctccagaactgctcggcggaccttccgtgttcctgtttcctccaaagcctaaggacaccctgatgatcagcagaacccctgaagtgacctgcgtggtggtggatgtgtctcacgaggaccccgaagtgaagttcaattggtacgtggacggcgtggaagtgcacaacgccaagaccaagcctagagaggaacagtacaacagcacctacagagtggtgtccgtgctgacagtgctgcaccaggattggctgaacggcaaagagtacaagtgcaaggtgtccaacaaggccctgcctgctcctatcgagaaaaccatcagcaaggccaagggccagcctagggaaccccaggtttacaccctgcctccatgccgcgaggaaatgaccaagaaccaggtgtccctgtggtgcctcgtgaagggcttctacccttccgatatcgccgtggaatgggagagcaatggccagcctgagaacaactacaagacaacccctcctgtgctggacagcgacggctcattcttcctgtacagcaagctgaccgtggacaagtccagatggcagcagggcaacgtgttcagctgtagcgtgctgcacgaagccctgcacagccactacacccagaagtccctgtctctgagccccggcaagtgataa

SEQ ID NO: 470 - DNA, 1638 bp, synthetic construct
  source 1..1638: mol_type = other DNA
atggattggatctggcgcatcctgtttctcgtgggagctgccacaggcgcccactctcaagttcacctgacacagtctggccccgaagtgcggaagcctggcacaagcgtgaaggtgtcctgtaaagcccctggcaacaccctgaaaacctacgacctgcactgggtccgatctgtgcctggacaaggactgcagtggatgggctggattagccacgagggcgacaagaaagtgatcgtggaacggttcaaggccaaagtgaccatcgactgggacagaagcaccaacaccgcctacctgcagctgagcggactgacatctggcgataccgccgtgtactactgtgccaagggcagcaagcaccggctgagagattacgccctgtacgacgatgacggcgccctgaattgggccgtcgatgtggactacctgagcaacctggaattctggggccagggaacagccgtgacagtgtcttccggtggcggaggaagcggaggcggaggttcaggcggcggaggctctggcggtggtggatctgattttgtgctgacacagagccctcacagcctgagcgttacacctggcgagagcgccagcatcagctgcaagtctagccactctctgatccacggcgaccggaacaactacctggcttggtacgtgcagaagcccggcagatctcctcagctgctgatctacctggccagcagcagagctagcggcgtgccagatagattttctggcagcggcagcgacaaggatttcaccctgaagatctccagagtggaaaccgaggacgtgggcacctactactgtatgcagggcagagagagcccctggacatttggccagggcaccaaggtggacatcaaaggtggcggtggttctggcggaggcggaagtggcggcggtgggtccggaggtggtggatctgaacctaagagcagcgacaagacccacacctgtcctccatgtcctgctccagaactgctggccggaccttccgtgttcctgtttcctccaaagcctaaggacaccctgatgatcagcagaacccctgaagtgacctgcgtggtggtggatgtgtctcacgaggaccccgaagtgaagttcaattggtacgtggacggcgtggaagtgcacaatgccaagaccaagcctagagaggaacagtacaacagcacctacagagtggtgtccgtgctgaccgtgctgcaccaggattggctgaacggcaaagagtacaagtgcaaggtgtccaacaaggccctgcctctgcctgaggaaaagaccatcagcaaggccaagggccagcctagggaaccccaggtttacaccctgcctccatgccgcgaggaaatgaccaagaaccaggtgtccctgtggtgcctcgtgaagggcttctacccttccgatatcgccgtggaatgggagagcaatggccagcctgagaacaactacaagacaacccctcctgtgctggacagcgacggctcattcttcctgtacagcaagctgaccgtggacaagtccagatggcagcagggcaacgtgttcagctgtagcgtgctgcacgaagccctgcacagccactacacccagaagtccctgtctctgagccccggcaagtgataa

SEQ ID NO: 471 - DNA, 1638 bp, synthetic construct
  source 1..1638: mol_type = other DNA
atggattggatctggcgcatcctgtttctcgtgggagctgccacaggcgcccactctcaagttcacctgacacagtctggccccgaagtgcggaagcctggcacaagcgtgaaggtgtcctgtaaagcccctggcaacaccctgaaaacctacgacctgcactgggtccgatctgtgcctggacaaggactgcagtggatgggctggattagccacgagggcgacaagaaagtgatcgtggaacggttcaaggccaaagtgaccatcgactgggacagaagcaccaacaccgcctacctgcagctgagcggactgacatctggcgataccgccgtgtactactgtgccaagggcagcaagcaccggctgagagattacgccctgtacgacgatgacggcgccctgaattgggccgtcgatgtggactacctgagcaacctggaattctggggccagggaacagccgtgacagtgtcttccggtggcggaggaagcggaggcggaggttcaggcggcggaggctctggcggtggtggatctgattttgtgctgacacagagccctcacagcctgagcgttacacctggcgagagcgccagcatcagctgcaagtctagccactctctgatccacggcgaccggaacaactacctggcttggtacgtgcagaagcccggcagatctcctcagctgctgatctacctggccagcagcagagctagcggcgtgccagatagattttctggcagcggcagcgacaaggatttcaccctgaagatctccagagtggaaaccgaggacgtgggcacctactactgtatgcagggcagagagagcccctggacatttggccagggcaccaaggtggacatcaaaggtggcggtggttctggcggaggcggaagtggcggcggtgggtccggaggtggtggatctgaacctaagagcagcgacaagacccacacctgtcctccatgtcctgctccagaactgctggccggaccttccgtgttcctgtttcctccaaagcctaaggacaccctgatgatcagcagaacccctgaagtgacctgcgtggtggtggatgtgtctcacgaggaccctgaagtgaagttcaattggtacgtggacggcgtggaagtgcacaacgccaagaccaagcctagagaggaacagtacaacagcacctacagagtggtgtccgtgctgaccgtgctgcaccaggattggctgaacggcaaagagtacaagtgcaaggtgtccaacaaggccctgcctgcccctgaggaaaagaccatcagcaaggccaagggccagcctagggaaccccaggtttacaccctgcctccatgccgcgaggaaatgaccaagaaccaggtgtccctgtggtgcctcgtgaagggcttctacccttccgatatcgccgtggaatgggagagcaatggccagcctgagaacaactacaagacaacccctcctgtgctggacagcgacggctcattcttcctgtacagcaagctgaccgtggacaagtccagatggcagcagggcaacgtgttcagctgtagcgtgctgcacgaagccctgcacagccactacacccagaagtccctgtctctgagccccggcaagtgataa

SEQ ID NO: 472 - DNA, 1638 bp, synthetic construct
  source 1..1638: mol_type = other DNA
atggattggatctggcgcatcctgtttctcgtgggagctgccacaggcgcccactctcaagttcacctgacacagtctggccccgaagtgcggaagcctggcacaagcgtgaaggtgtcctgtaaagcccctggcaacaccctgaaaacctacgacctgcactgggtccgatctgtgcctggacaaggactgcagtggatgggctggattagccacgagggcgacaagaaagtgatcgtggaacggttcaaggccaaagtgaccatcgactgggacagaagcaccaacaccgcctacctgcagctgagcggactgacatctggcgataccgccgtgtactactgtgccaagggcagcaagcaccggctgagagattacgccctgtacgacgatgacggcgccctgaattgggccgtcgatgtggactacctgagcaacctggaattctggggccagggaacagccgtgacagtgtcttccggtggcggaggaagcggaggcggaggttcaggcggcggaggctctggcggtggtggatctgattttgtgctgacacagagccctcacagcctgagcgttacacctggcgagagcgccagcatcagctgcaagtctagccactctctgatccacggcgaccggaacaactacctggcttggtacgtgcagaagcccggcagatctcctcagctgctgatctacctggccagcagcagagctagcggcgtgccagatagattttctggcagcggcagcgacaaggatttcaccctgaagatctccagagtggaaaccgaggacgtgggcacctactactgtatgcagggcagagagagcccctggacatttggccagggcaccaaggtggacatcaaaggtggcggtggttctggcggaggcggaagtggcggcggtgggtccggaggtggtggatctgaacctaagagcagcgacaagacccacacctgtcctccatgtcctgctccagaactgctggccggaccttccgtgttcctgtttcctccaaagcctaaggacaccctgatgatcagcagaacccctgaagtgacctgcgtggtggtggatgtgtctcacgaggaccctgaagtgaagttcaattggtacgtggacggcgtggaagtgcacaacgccaagaccaagcctagagaggaacagtacaacagcacctacagagtggtgtccgtgctgaccgtgctgcaccaggattggctgaacggcaaagagtacaagtgcaaggtgtccaacaaggccctgcctgcccctatcgaaaagaccatcagcaaggccaagggccagcctagggaaccccaggtttacaccctgcctccatgccgcgaggaaatgaccaagaaccaggtgtccctgtggtgcctcgtgaagggcttctacccttccgatatcgccgtggaatgggagagcaatggccagcctgagaacaactacaagacaacccctcctgtgctggacagcgacggctcattcttcctgtacagcaagctgaccgtggacaagtccagatggcagcagggcaacgtgttcagctgtagcgtgctgcacgaagccctgcacagccactacacccagaagtccctgtctctgagccccggcaagtgataa

SEQ ID NO: 473 - DNA, 1638 bp, synthetic construct
  source 1..1638: mol_type = other DNA
atggattggatctggcgcatcctgtttctcgtgggagctgccacaggcgcccactctcaagttcacctgacacagtctggccccgaagtgcggaagcctggcacaagcgtgaaggtgtcctgtaaagcccctggcaacaccctgaaaacctacgacctgcactgggtccgatctgtgcctggacaaggactgcagtggatgggctggattagccacgagggcgacaagaaagtgatcgtggaacggttcaaggccaaagtgaccatcgactgggacagaagcaccaacaccgcctacctgcagctgagcggactgacatctggcgataccgccgtgtactactgtgccaagggcagcaagcaccggctgagagattacgccctgtacgacgatgacggcgccctgaattgggccgtcgatgtggactacctgagcaacctggaattctggggccagggaacagccgtgacagtgtcttccggtggcggaggaagcggaggcggaggttcaggcggcggaggctctggcggtggtggatctgattttgtgctgacacagagccctcacagcctgagcgttacacctggcgagagcgccagcatcagctgcaagtctagccactctctgatccacggcgaccggaacaactacctggcttggtacgtgcagaagcccggcagatctcctcagctgctgatctacctggccagcagcagagctagcggcgtgccagatagattttctggcagcggcagcgacaaggatttcaccctgaagatctccagagtggaaaccgaggacgtgggcacctactactgtatgcagggcagagagagcccctggacatttggccagggcaccaaggtggacatcaaaggtggcggtggttctggcggaggcggaagtggcggcggtgggtccggaggtggtggatctgaacctaagagcagcgacaagacccacacctgtcctccatgtcctgctccagaactgctgggcggaccttccgtgttcctgtttcctccaaagcctaaggacaccctgatgatcagcagaacccctgaagtgacctgcgtggtggtggatgtgtctcacgaggaccctgaagtgaagttcaattggtacgtggacggcgtggaagtgcacaacgccaagaccaagcctagagaggaacagtacaacagcacctacagagtggtgtccgtgctgaccgtgctgcaccaggattggctgaacggcaaagagtacaagtgcaaggtgtccaacaaggccctgcctgcccctgaggaaaagaccatcagcaaggccaagggccagcctagggaaccccaggtttacaccctgcctccatgccgcgaggaaatgaccaagaaccaggtgtccctgtggtgcctcgtgaagggcttctacccttccgatatcgccgtggaatgggagagcaatggccagcctgagaacaactacaagacaacccctcctgtgctggacagcgacggctcattcttcctgtacagcaagctgaccgtggacaagtccagatggcagcagggcaacgtgttcagctgtagcgtgctgcacgaagccctgcacagccactacacccagaagtccctgtctctgagccccggcaagtgataa

SEQ ID NO: 474 - DNA, 1638 bp, synthetic construct; identical to SEQ ID NO: 458
  source 1..1638: mol_type = other DNA

SEQ ID NO: 475 - DNA, 1638 bp, synthetic construct; identical to SEQ ID NO: 459
  source 1..1638: mol_type = other DNA

SEQ ID NO: 476 - DNA, 1638 bp, synthetic construct; identical to SEQ ID NO: 460
  source 1..1638: mol_type = other DNA

SEQ ID NO: 477 - DNA, 1638 bp, synthetic construct; identical to SEQ ID NO: 461
  source 1..1638: mol_type = other DNA

SEQ ID NO: 478 - DNA, 1638 bp, synthetic construct; identical to SEQ ID NO: 462
  source 1..1638: mol_type = other DNA

SEQ ID NO: 479 - DNA, 1638 bp, synthetic construct; identical to SEQ ID NO: 463
  source 1..1638: mol_type = other DNA

SEQ ID NO: 480 - DNA, 1638 bp, synthetic construct; identical to SEQ ID NO: 464
  source 1..1638: mol_type = other DNA

SEQ ID NO: 481 - DNA, 1638 bp, synthetic construct; identical to SEQ ID NO: 465
  source 1..1638: mol_type = other DNA

SEQ ID NO: 482 - DNA, 1638 bp, synthetic construct; identical to SEQ ID NO: 466
  source 1..1638: mol_type = other DNA

SEQ ID NO: 483 - DNA, 1638 bp, synthetic construct; identical to SEQ ID NO: 467
  source 1..1638: mol_type = other DNA

SEQ ID NO: 484 - DNA, 1638 bp, synthetic construct; identical to SEQ ID NO: 468
  source 1..1638: mol_type = other DNA

SEQ ID NO: 485 - DNA, 1638 bp, synthetic construct; identical to SEQ ID NO: 469
  source 1..1638: mol_type = other DNA

SEQ ID NO: 486 - DNA, 1638 bp, synthetic construct; identical to SEQ ID NO: 470
  source 1..1638: mol_type = other DNA

SEQ ID NO: 487 - DNA, 1638 bp, synthetic construct; identical to SEQ ID NO: 471
  source 1..1638: mol_type = other DNA

SEQ ID NO: 488 - DNA, 1638 bp, synthetic construct; identical to SEQ ID NO: 472
  source 1..1638: mol_type = other DNA

SEQ ID NO: 489 - DNA, 1638 bp, synthetic construct; identical to SEQ ID NO: 473
  source 1..1638: mol_type = other DNA

SEQ ID NO: 490 - DNA, 1638 bp, synthetic construct
  source 1..1638: mol_type = other DNA
atggattggatctggcgcatcctgtttctcgtgggagctgccacaggcgcccactctcaagttcacctgacacagtctggccccgaagtgcggaagcctggcacaagcgtgaaggtgtcctgtaaagcccctggcaacaccctgaaaacctacgacctgcactgggtccgatctgtgcctggacaaggactgcagtggatgggctggattagccacgagggcgacaagaaagtgatcgtggaacggttcaaggccaaagtgaccatcgactgggacagaagcaccaacaccgcctacctgcagctgagcggactgacatctggcgataccgccgtgtactactgtgccaagggcagcaagcaccggctgagagattacgccctgtacgacgatgacggcgccctgaattgggccgtcgatgtggactacctgagcaacctggaattctggggccagggaacagccgtgacagtgtcttccggtggcggaggaagcggaggcggaggttcaggcggcggaggctctggcggtggtggatctgattttgtgctgacacagagccctcacagcctgagcgttacacctggcgagagcgccagcatcagctgcaagtctagccactctctgatccacggcgaccggaacaactacctggcttggtacgtgcagaagcccggcagatctcctcagctgctgatctacctggccagcagcagagctagcggcgtgccagatagattttctggcagcggcagcgacaaggatttcaccctgaagatctccagagtggaaaccgaggacgtgggcacctactactgtatgcagggcagagagagcccctggacatttggccagggcaccaaggtggacatcaaaggtggcggtggttctggcggaggcggaagtggcggcggtgggtccggaggtggtggatctgaacctaagagcagcgacaagacccacacctgtcctccatgtcctgctccagaactgctcggcggaccttccgtgttcctgtttcctccaaagcctaaggacaccctgatgatcagcagaacccctgaagtgacctgcgtggtggtggatgtgtctcacgaggaccccgaagtgaagttcaattggtacgtggacggcgtggaagtgcacaacgccaagaccaagcctagagaggaacagtacaacagcacctacagagtggtgtccgtgctgacagtgctgcaccaggattggctgaacggcaaagagtacaagtgcaaggtgtccaacaaggccctgcctgctcctatcgagaaaaccatcagcaaggccaagggccagcctagggaaccccaggtttacacactgcctccaagccgcgacgaactgaccaagaaccaggtgtccctgacctgcctcgtgaagggcttctacccttccgatatcgccgtggaatgggagagcaatggccagcctgagaacaactacaagacaacccctcctgtgctggacagcgacggctcattcttcctgtacagcaagctgactgtggataagtcccggtggcagcagggcaacgtgttcagctgttctgtgatgcacgaagccctgcacaaccactacacccagaaaagcctgtctctgagccccggcaagtgataa

SEQ ID NO: 491 - DNA, 1638 bp, synthetic construct
  source 1..1638: mol_type = other DNA
atggattggatctggcgcatcctgtttctcgtgggagctgccacaggcgcccactctcaagttcacctgacacagtctggccccgaagtgcggaagcctggcacaagcgtgaaggtgtcctgtaaagcccctggcaacaccctgaaaacctacgacctgcactgggtccgatctgtgcctggacaaggactgcagtggatgggctggattagccacgagggcgacaagaaagtgatcgtggaacggttcaaggccaaagtgaccatcgactgggacagaagcaccaacaccgcctacctgcagctgagcggactgacatctggcgataccgccgtgtactactgtgccaagggcagcaagcaccggctgagagattacgccctgtacgacgatgacggcgccctgaattgggccgtcgatgtggactacctgagcaacctggaattctggggccagggaacagccgtgacagtgtcttccggtggcggaggaagcggaggcggaggttcaggcggcggaggctctggcggtggtggatctgattttgtgctgacacagagccctcacagcctgagcgttacacctggcgagagcgccagcatcagctgcaagtctagccactctctgatccacggcgaccggaacaactacctggcttggtacgtgcagaagcccggcagatctcctcagctgctgatctacctggccagcagcagagctagcggcgtgccagatagattttctggcagcggcagcgacaaggatttcaccctgaagatctccagagtggaaaccgaggacgtgggcacctactactgtatgcagggcagagagagcccctggacatttggccagggcaccaaggtggacatcaaaggtggcggtggttctggcggaggcggaagtggcggcggtgggtccggaggtggtggatctgaacctaagagcagcgacaagacccacacctgtcctccatgtcctgctccagaactgctcggcggaccttccgtgttcctgtttcctccaaagcctaaggacaccctgatgatcagcagaacccctgaagtgacctgcgtggtggtggatgtgtctcacgaggaccccgaagtgaagttcaattggtacgtggacggcgtggaagtgcacaacgccaagaccaagcctagagaggaacagtacaacagcacctacagagtggtgtccgtgctgacagtgctgcaccaggattggctgaacggcaaagagtacaagtgcaaggtgtccaacaaggccctgcctgctcctatcgagaaaaccatcagcaaggccaagggccagcctagggaaccccaggtttacacactgcctccaagccgcgacgaactgaccaagaaccaggtgtccctgacctgcctcgtgaagggcttctacccttccgatatcgccgtggaatgggagagcaatggccagcctgagaacaactacaagacaacccctcctgtgctggacagcgacggctcattcttcctgtacagcaagctgaccgtggacaagtccagatggcagcagggcaacgtgttcagctgtagcgtgctgcacgaagccctgcacagccactacacccagaaaagcctgtctctgagccccggcaaatgataa

SEQ ID NO: 492 - DNA, 1638 bp, synthetic construct
  source 1..1638: mol_type = other DNA
atggattggatctggcgcatcctgtttctcgtgggagctgccacaggcgcccactctcaagttcacctgacacagtctggccccgaagtgcggaagcctggcacaagcgtgaaggtgtcctgtaaagcccctggcaacaccctgaaaacctacgacctgcactgggtccgatctgtgcctggacaaggactgcagtggatgggctggattagccacgagggcgacaagaaagtgatcgtggaacggttcaaggccaaagtgaccatcgactgggacagaagcaccaacaccgcctacctgcagctgagcggactgacatctggcgataccgccgtgtactactgtgccaagggcagcaagcaccggctgagagattacgccctgtacgacgatgacggcgccctgaattgggccgtcgatgtggactacctgagcaacctggaattctggggccagggaacagccgtgacagtgtcttccggtggcggaggaagcggaggcggaggttcaggcggcggaggctctggcggtggtggatctgattttgtgctgacacagagccctcacagcctgagcgttacacctggcgagagcgccagcatcagctgcaagtctagccactctctgatccacggcgaccggaacaactacctggcttggtacgtgcagaagcccggcagatctcctcagctgctgatctacctggccagcagcagagctagcggcgtgccagatagattttctggcagcggcagcgacaaggatttcaccctgaagatctccagagtggaaaccgaggacgtgggcacctactactgtatgcagggcagagagagcccctggacatttggccagggcaccaaggtggacatcaaaggtggcggtggttctggcggaggcggaagtggcggcggtgggtccggaggtggtggatctgaacctaagagcagcgacaagacccacacctgtcctccatgtcctgctccagaactgctggccggaccttccgtgttcctgtttcctccaaagcctaaggacaccctgatgatcagcagaacccctgaagtgacctgcgtggtggtggatgtgtctcacgaggaccccgaagtgaagttcaattggtacgtggacggcgtggaagtgcacaatgccaagaccaagcctagagaggaacagtacaacagcacctacagagtggtgtccgtgctgaccgtgctgcaccaggattggctgaacggcaaagagtacaagtgcaaggtgtccaacaaggccctgcctctgcctgaggaaaagaccatcagcaaggccaagggccagcctagggaaccccaggtttacacactgcctccaagccgcgacgaactgaccaagaaccaggtgtccctgacctgcctcgtgaagggcttctacccttccgatatcgccgtggaatgggagagcaatggccagcctgagaacaactacaagacaacccctcctgtgctggacagcgacggctcattcttcctgtacagcaagctgaccgtggacaagtccagatggcagcagggcaacgtgttcagctgtagcgtgctgcacgaagccctgcacagccactacacccagaaaagcctgtctctgagccccggcaaatgataa

SEQ ID NO: 493 - DNA, 1638 bp, synthetic construct
  source 1..1638: mol_type = other DNA
atggattggatctggcgcatcctgtttctcgtgggagctgccacaggcgcccactctcaagttcacctgacacagtctggccccgaagtgcggaagcctggcacaagcgtgaaggtgtcctgtaaagcccctggcaacaccctgaaaacctacgacctgcactgggtccgatctgtgcctggacaaggactgcagtggatgggctggattagccacgagggcgacaagaaagtgatcgtggaacggttcaaggccaaagtgaccatcgactgggacagaagcaccaacaccgcctacctgcagctgagcggactgacatctggcgataccgccgtgtactactgtgccaagggcagcaagcaccggctgagagattacgccctgtacgacgatgacggcgccctgaattgggccgtcgatgtggactacctgagcaacctggaattctggggccagggaacagccgtgacagtgtcttccggtggcggaggaagcggaggcggaggttcaggcggcggaggctctggcggtggtggatctgattttgtgctgacacagagccctcacagcctgagcgttacacctggcgagagcgccagcatcagctgcaagtctagccactctctgatccacggcgaccggaacaactacctggcttggtacgtgcagaagcccggcagatctcctcagctgctgatctacctggccagcagcagagctagcggcgtgccagatagattttctggcagcggcagcgacaaggatttcaccctgaagatctccagagtggaaaccgaggacgtgggcacctactactgtatgcagggcagagagagcccctggacatttggccagggcaccaaggtggacatcaaaggtggcggtggttctggcggaggcggaagtggcggcggtgggtccggaggtggtggatctgaacctaagagcagcgacaagacccacacctgtcctccatgtcctgctccagaactgctggccggaccttccgtgttcctgtttcctccaaagcctaaggacaccctgatgatcagcagaacccctgaagtgacctgcgtggtggtggatgtgtctcacgaggaccctgaagtgaagttcaattggtacgtggacggcgtggaagtgcacaacgccaagaccaagcctagagaggaacagtacaacagcacctacagagtggtgtccgtgctgaccgtgctgcaccaggattggctgaacggcaaagagtacaagtgcaaggtgtccaacaaggccctgcctgcccctgaggaaaagaccatcagcaaggccaagggccagcctagggaaccccaggtttacacactgcctccaagccgcgacgaactgaccaagaaccaggtgtccctgacctgcctcgtgaagggcttctacccttccgatatcgccgtggaatgggagagcaatggccagcctgagaacaactacaagacaacccctcctgtgctggacagcgacggctcattcttcctgtacagcaagctgaccgtggacaagtccagatggcagcagggcaacgtgttcagctgtagcgtgctgcacgaagccctgcacagccactacacccagaaaagcctgtctctgagccccggcaaatgataa

SEQ ID NO: 494 - DNA, 1638 bp, synthetic construct
  source 1..1638: mol_type = other DNA
atggattggatctggcgcatcctgtttctcgtgggagctgccacaggcgcccactctcaagttcacctgacacagtctggccccgaagtgcggaagcctggcacaagcgtgaaggtgtcctgtaaagcccctggcaacaccctgaaaacctacgacctgcactgggtccgatctgtgcctggacaaggactgcagtggatgggctggattagccacgagggcgacaagaaagtgatcgtggaacggttcaaggccaaagtgaccatcgactgggacagaagcaccaacaccgcctacctgcagctgagcggactgacatctggcgataccgccgtgtactactgtgccaagggcagcaagcaccggctgagagattacgccctgtacgacgatgacggcgccctgaattgggccgtcgatgtggactacctgagcaacctggaattctggggccagggaacagccgtgacagtgtcttccggtggcggaggaagcggaggcggaggttcaggcggcggaggctctggcggtggtggatctgattttgtgctgacacagagccctcacagcctgagcgttacacctggcgagagcgccagcatcagctgcaagtctagccactctctgatccacggcgaccggaacaactacctggcttggtacgtgcagaagcccggcagatctcctcagctgctgatctacctggccagcagcagagctagcggcgtgccagatagattttctggcagcggcagcgacaaggatttcaccctgaagatctccagagtggaaaccgaggacgtgggcacctactactgtatgcagggcagagagagcccctggacatttggccagggcaccaaggtggacatcaaaggtggcggtggttctggcggaggcggaagtggcggcggtgggtccggaggtggtggatctgaacctaagagcagcgacaagacccacacctgtcctccatgtcctgctccagaactgctggccggaccttccgtgttcctgtttcctccaaagcctaaggacaccctgatgatcagcagaacccctgaagtgacctgcgtggtggtggatgtgtctcacgaggaccctgaagtgaagttcaattggtacgtggacggcgtggaagtgcacaacgccaagaccaagcctagagaggaacagtacaacagcacctacagagtggtgtccgtgctgaccgtgctgcaccaggattggctgaacggcaaagagtacaagtgcaaggtgtccaacaaggccctgcctgcccctatcgaaaagaccatcagcaaggccaagggccagcctagggaaccccaggtttacacactgcctccaagccgcgacgaactgaccaagaaccaggtgtccctgacctgcctcgtgaagggcttctacccttccgatatcgccgtggaatgggagagcaatggccagcctgagaacaactacaagacaacccctcctgtgctggacagcgacggctcattcttcctgtacagcaagctgaccgtggacaagtccagatggcagcagggcaacgtgttcagctgtagcgtgctgcacgaagccctgcacagccactacacccagaaaagcctgtctctgagccccggcaaatgataa

SEQ ID NO: 495 - DNA, 1638 bp, synthetic construct
  source 1..1638: mol_type = other DNA
atggattggatctggcgcatcctgtttctcgtgggagctgccacaggcgcccactctcaagttcacctgacacagtctggccccgaagtgcggaagcctggcacaagcgtgaaggtgtcctgtaaagcccctggcaacaccctgaaaacctacgacctgcactgggtccgatctgtgcctggacaaggactgcagtggatgggctggattagccacgagggcgacaagaaagtgatcgtggaacggttcaaggccaaagtgaccatcgactgggacagaagcaccaacaccgcctacctgcagctgagcggactgacatctggcgataccgccgtgtactactgtgccaagggcagcaagcaccggctgagagattacgccctgtacgacgatgacggcgccctgaattgggccgtcgatgtggactacctgagcaacctggaattctggggccagggaacagccgtgacagtgtcttccggtggcggaggaagcggaggcggaggttcaggcggcggaggctctggcggtggtggatctgattttgtgctgacacagagccctcacagcctgagcgttacacctggcgagagcgccagcatcagctgcaagtctagccactctctgatccacggcgaccggaacaactacctggcttggtacgtgcagaagcccggcagatctcctcagctgctgatctacctggccagcagcagagctagcggcgtgccagatagattttctggcagcggcagcgacaaggatttcaccctgaagatctccagagtggaaaccgaggacgtgggcacctactactgtatgcagggcagagagagcccctggacatttggccagggcaccaaggtggacatcaaaggtggcggtggttctggcggaggcggaagtggcggcggtgggtccggaggtggtggatctgaacctaagagcagcgacaagacccacacctgtcctccatgtcctgctccagaactgctgggcggaccttccgtgttcctgtttcctccaaagcctaaggacaccctgatgatcagcagaacccctgaagtgacctgcgtggtggtggatgtgtctcacgaggaccctgaagtgaagttcaattggtacgtggacggcgtggaagtgcacaacgccaagaccaagcctagagaggaacagtacaacagcacctacagagtggtgtccgtgctgaccgtgctgcaccaggattggctgaacggcaaagagtacaagtgcaaggtgtccaacaaggccctgcctgcccctgaggaaaagaccatcagcaaggccaagggccagcctagggaaccccaggtttacacactgcctccaagccgcgacgaactgaccaagaaccaggtgtccctgacctgcctcgtgaagggcttctacccttccgatatcgccgtggaatgggagagcaatggccagcctgagaacaactacaagacaacccctcctgtgctggacagcgacggctcattcttcctgtacagcaagctgaccgtggacaagtccagatggcagcagggcaacgtgttcagctgtagcgtgctgcacgaagccctgcacagccactacacccagaaaagcctgtctctgagccccggcaaatgataa

SEQ ID NO: 496 - DNA, 1638 bp, synthetic construct
  source 1..1638: mol_type = other DNA
atggattggatctggcgcatcctgtttctcgtgggagctgccacaggcgcccactctcaagttcacctgacacagtctggccccgaagtgcggaagcctggcacaagcgtgaaggtgtcctgtaaagcccctggcaacaccctgaaaacctacgacctgcactgggtccgatctgtgcctggacaaggactgcagtggatgggctggattagccacgagggcgacaagaaagtgatcgtggaacggttcaaggccaaagtgaccatcgactgggacagaagcaccaacaccgcctacctgcagctgagcggactgacatctggcgataccgccgtgtactactgtgccaagggcagcaagcaccggctgagagattacgccctgtacgacgatgacggcgccctgaattgggccgtcgatgtggactacctgagcaacctggaattctggggccagggaacagccgtgacagtgtcttccggtggcggaggaagcggaggcggaggttcaggcggcggaggctctggcggtggtggatctgattttgtgctgacacagagccctcacagcctgagcgttacacctggcgagagcgccagcatcagctgcaagtctagccactctctgatccacggcgaccggaacaactacctggcttggtacgtgcagaagcccggcagatctcctcagctgctgatctacctggccagcagcagagctagcggcgtgccagatagattttctggcagcggcagcgacaaggatttcaccctgaagatctccagagtggaaaccgaggacgtgggcacctactactgtatgcagggcagagagagcccctggacatttggccagggcaccaaggtggacatcaaaggtggcggtggttctggcggaggcggaagtggcggcggtgggtccggaggtggtggatctgaacctaagagcagcgacaagacccacacctgtcctccatgtcctgctccagaactgctcggcggaccttccgtgttcctgtttcctccaaagcctaaggacaccctgatgatcagcagaacccctgaagtgacctgcgtggtggtggatgtgtctcacgaggaccccgaagtgaagttcaattggtacgtggacggcgtggaagtgcacaacgccaagaccaagcctagagaggaacagtacaacagcacctacagagtggtgtccgtgctgacagtgctgcaccaggattggctgaacggcaaagagtacaagtgcaaggtgtccaacaaggccctgcctgctcctatcgagaaaaccatcagcaaggccaagggccagcctcgcgaacctcaagtctgtacactgcctcctagccgcgacgaactgaccaagaaccaggtgtccctgagctgcgccgtgaagggcttttacccttccgatatcgccgtggaatgggagagcaatggccagcctgagaacaactacaagacaacccctcctgtgctggacagcgacggctcattcttcctggtgtccaagctgacagtggacaagagcagatggcagcagggcaacgtgttcagctgcagcgtgctgcatgaagccctgcacagccactacacccagaagtccctgtctctgagccccggcaagtgataa

SEQ ID NO: 497 - DNA, 1638 bp, synthetic construct
  source 1..1638: mol_type = other DNA
atggattggatctggcgcatcctgtttctcgtgggagctgccacaggcgcccactctcaagttcacctgacacagtctggccccgaagtgcggaagcctggcacaagcgtgaaggtgtcctgtaaagcccctggcaacaccctgaaaacctacgacctgcactgggtccgatctgtgcctggacaaggactgcagtggatgggctggattagccacgagggcgacaagaaagtgatcgtggaacggttcaaggccaaagtgaccatcgactgggacagaagcaccaacaccgcctacctgcagctgagcggactgacatctggcgataccgccgtgtactactgtgccaagggcagcaagcaccggctgagagattacgccctgtacgacgatgacggcgccctgaattgggccgtcgatgtggactacctgagcaacctggaattctggggccagggaacagccgtgacagtgtcttccggtggcggaggaagcggaggcggaggttcaggcggcggaggctctggcggtggtggatctgattttgtgctgacacagagccctcacagcctgagcgttacacctggcgagagcgccagcatcagctgcaagtctagccactctctgatccacggcgaccggaacaactacctggcttggtacgtgcagaagcccggcagatctcctcagctgctgatctacctggccagcagcagagctagcggcgtgccagatagattttctggcagcggcagcgacaaggatttcaccctgaagatctccagagtggaaaccgaggacgtgggcacctactactgtatgcagggcagagagagcccctggacatttggccagggcaccaaggtggacatcaaaggtggcggtggttctggcggaggcggaagtggcggcggtgggtccggaggtggtggatctgaacctaagagcagcgacaagacccacacctgtcctccatgtcctgctccagaactgctggccggaccttccgtgttcctgtttcctccaaagcctaaggacaccctgatgatcagcagaacccctgaagtgacctgcgtggtggtggatgtgtctcacgaggaccccgaagtgaagttcaattggtacgtggacggcgtggaagtgcacaatgccaagaccaagcctagagaggaacagtacaacagcacctacagagtggtgtccgtgctgaccgtgctgcaccaggattggctgaacggcaaagagtacaagtgcaaggtgtccaacaaggccctgcctctgcctgaggaaaagaccatcagcaaggccaagggccagcctcgcgaacctcaagtctgtacactgcctcctagccgcgacgaactgaccaagaaccaggtgtccctgagctgcgccgtgaagggcttttacccttccgatatcgccgtggaatgggagagcaatggccagcctgagaacaactacaagacaacccctcctgtgctggacagcgacggctcattcttcctggtgtccaagctgacagtggacaagagcagatggcagcagggcaacgtgttcagctgcagcgtgctgcatgaagccctgcacagccactacacccagaagtccctgtctctgagccccggcaagtgataa

SEQ ID NO: 498 - DNA, 1638 bp, synthetic construct
  source 1..1638: mol_type = other DNA
atggattggatctggcgcatcctgtttctcgtgggagctgccacaggcgcccactctcaagttcacctgacacagtctggccccgaagtgcggaagcctggcacaagcgtgaaggtgtcctgtaaagcccctggcaacaccctgaaaacctacgacctgcactgggtccgatctgtgcctggacaaggactgcagtggatgggctggattagccacgagggcgacaagaaagtgatcgtggaacggttcaaggccaaagtgaccatcgactgggacagaagcaccaacaccgcctacctgcagctgagcggactgacatctggcgataccgccgtgtactactgtgccaagggcagcaagcaccggctgagagattacgccctgtacgacgatgacggcgccctgaattgggccgtcgatgtggactacctgagcaacctggaattctggggccagggaacagccgtgacagtgtcttccggtggcggaggaagcggaggcggaggttcaggcggcggaggctctggcggtggtggatctgattttgtgctgacacagagccctcacagcctgagcgttacacctggcgagagcgccagcatcagctgcaagtctagccactctctgatccacggcgaccggaacaactacctggcttggtacgtgcagaagcccggcagatctcctcagctgctgatctacctggccagcagcagagctagcggcgtgccagatagattttctggcagcggcagcgacaaggatttcaccctgaagatctccagagtggaaaccgaggacgtgggcacctactactgtatgcagggcagagagagcccctggacatttggccagggcaccaaggtggacatcaaaggtggcggtggttctggcggaggcggaagtggcggcggtgggtccggaggtggtggatctgaacctaagagcagcgacaagacccacacctgtcctccatgtcctgctccagaactgctggccggaccttccgtgttcctgtttcctccaaagcctaaggacaccctgatgatcagcagaacccctgaagtgacctgcgtggtggtggatgtgtctcacgaggaccctgaagtgaagttcaattggtacgtggacggcgtggaagtgcacaacgccaagaccaagcctagagaggaacagtacaacagcacctacagagtggtgtccgtgctgaccgtgctgcaccaggattggctgaacggcaaagagtacaagtgcaaggtgtccaacaaggccctgcctgcccctgaggaaaagaccatcagcaaggccaagggccagcctcgcgaacctcaagtctgtacactgcctcctagccgcgacgaactgaccaagaaccaggtgtccctgagctgcgccgtgaagggcttttacccttccgatatcgccgtggaatgggagagcaatggccagcctgagaacaactacaagacaacccctcctgtgctggacagcgacggctcattcttcctggtgtccaagctgacagtggacaagagcagatggcagcagggcaacgtgttcagctgcagcgtgctgcatgaagccctgcacagccactacacccagaagtccctgtctctgagccccggcaagtgataa

SEQ ID NO: 499 - DNA, 1638 bp, synthetic construct
  source 1..1638: mol_type = other DNA
atggattggatctggcgcatcctgtttctcgtgggagctgccacaggcgcccactctcaagttcacctgacacagtctggccccgaagtgcggaagcctggcacaagcgtgaaggtgtcctgtaaagcccctggcaacaccctgaaaacctacgacctgcactgggtccgatctgtgcctggacaaggactgcagtggatgggctggattagccacgagggcgacaagaaagtgatcgtggaacggttcaaggccaaagtgaccatcgactgggacagaagcaccaacaccgcctacctgcagctgagcggactgacatctggcgataccgccgtgtactactgtgccaagggcagcaagcaccggctgagagattacgccctgtacgacgatgacggcgccctgaattgggccgtcgatgtggactacctgagcaacctggaattctggggccagggaacagccgtgacagtgtcttccggtggcggaggaagcggaggcggaggttcaggcggcggaggctctggcggtggtggatctgattttgtgctgacacagagccctcacagcctgagcgttacacctggcgagagcgccagcatcagctgcaagtctagccactctctgatccacggcgaccggaacaactacctggcttggtacgtgcagaagcccggcagatctcctcagctgctgatctacctggccagcagcagagctagcggcgtgccagatagattttctggcagcggcagcgacaaggatttcaccctgaagatctccagagtggaaaccgaggacgtgggcacctactactgtatgcagggcagagagagcccctggacatttggccagggcaccaaggtggacatcaaaggtggcggtggttctggcggaggcggaagtggcggcggtgggtccggaggtggtggatctgaacctaagagcagcgacaagacccacacctgtcctccatgtcctgctccagaactgctggccggaccttccgtgttcctgtttcctccaaagcctaaggacaccctgatgatcagcagaacccctgaagtgacctgcgtggtggtggatgtgtctcacgaggaccctgaagtgaagttcaattggtacgtggacggcgtggaagtgcacaacgccaagaccaagcctagagaggaacagtacaacagcacctacagagtggtgtccgtgctgaccgtgctgcaccaggattggctgaacggcaaagagtacaagtgcaaggtgtccaacaaggccctgcctgcccctatcgaaaagaccatcagcaaggccaagggccagcctcgcgaacctcaagtctgtacactgcctcctagccgcgacgaactgaccaagaaccaggtgtccctgagctgcgccgtgaagggcttttacccttccgatatcgccgtggaatgggagagcaatggccagcctgagaacaactacaagacaacccctcctgtgctggacagcgacggctcattcttcctggtgtccaagctgacagtggacaagagcagatggcagcagggcaacgtgttcagctgcagcgtgctgcatgaagccctgcacagccactacacccagaagtccctgtctctgagccccggcaagtgataa

SEQ ID NO: 500 - DNA, 1638 bp, synthetic construct
  source 1..1638: mol_type = other DNA
atggattggatctggcgcatcctgtttctcgtgggagctgccacaggcgcccactctcaagttcacctgacacagtctggccccgaagtgcggaagcctggcacaagcgtgaaggtgtcctgtaaagcccctggcaacaccctgaaaacctacgacctgcactgggtccgatctgtgcctggacaaggactgcagtggatgggctggattagccacgagggcgacaagaaagtgatcgtggaacggttcaaggccaaagtgaccatcgactgggacagaagcaccaacaccgcctacctgcagctgagcggactgacatctggcgataccgccgtgtactactgtgccaagggcagcaagcaccggctgagagattacgccctgtacgacgatgacggcgccctgaattgggccgtcgatgtggactacctgagcaacctggaattctggggccagggaacagccgtgacagtgtcttccggtggcggaggaagcggaggcggaggttcaggcggcggaggctctggcggtggtggatctgattttgtgctgacacagagccctcacagcctgagcgttacacctggcgagagcgccagcatcagctgcaagtctagccactctctgatccacggcgaccggaacaactacctggcttggtacgtgcagaagcccggcagatctcctcagctgctgatctacctggccagcagcagagctagcggcgtgccagatagattttctggcagcggcagcgacaaggatttcaccctgaagatctccagagtggaaaccgaggacgtgggcacctactactgtatgcagggcagagagagcccctggacatttggccagggcaccaaggtggacatcaaaggtggcggtggttctggcggaggcggaagtggcggcggtgggtccggaggtggtggatctgaacctaagagcagcgacaagacccacacctgtcctccatgtcctgctccagaactgctgggcggaccttccgtgttcctgtttcctccaaagcctaaggacaccctgatgatcagcagaacccctgaagtgacctgcgtggtggtggatgtgtctcacgaggaccctgaagtgaagttcaattggtacgtggacggcgtggaagtgcacaacgccaagaccaagcctagagaggaacagtacaacagcacctacagagtggtgtccgtgctgaccgtgctgcaccaggattggctgaacggcaaagagtacaagtgcaaggtgtccaacaaggccctgcctgcccctgaggaaaagaccatcagcaaggccaagggccagcctcgcgaacctcaagtctgtacactgcctcctagccgcgacgaactgaccaagaaccaggtgtccctgagctgcgccgtgaagggcttttacccttccgatatcgccgtggaatgggagagcaatggccagcctgagaacaactacaagacaacccctcctgtgctggacagcgacggctcattcttcctggtgtccaagctgacagtggacaagagcagatggcagcagggcaacgtgttcagctgcagcgtgctgcatgaagccctgcacagccactacacccagaagtccctgtctctgagccccggcaagtgataa

SEQ ID NO: 501 - DNA, 1638 bp, synthetic construct
  source 1..1638: mol_type = other DNA
atggattggatctggcgcatcctgtttctcgtgggagctgccacaggcgcccactctcaagttcacctgacacagtctggccccgaagtgcggaagcctggcacaagcgtgaaggtgtcctgtaaagcccctggcaacaccctgaaaacctacgacctgcactgggtccgatctgtgcctggacaaggactgcagtggatgggctggattagccacgagggcgacaagaaagtgatcgtggaacggttcaaggccaaagtgaccatcgactgggacagaagcaccaacaccgcctacctgcagctgagcggactgacatctggcgataccgccgtgtactactgtgccaagggcagcaagcaccggctgagagattacgccctgtacgacgatgacggcgccctgaattgggccgtcgatgtggactacctgagcaacctggaattctggggccagggaacagccgtgacagtgtcttccggtggcggaggaagcggaggcggaggttcaggcggcggaggctctggcggtggtggatctgattttgtgctgacacagagccctcacagcctgagcgttacacctggcgagagcgccagcatcagctgcaagtctagccactctctgatccacggcgaccggaacaactacctggcttggtacgtgcagaagcccggcagatctcctcagctgctgatctacctggccagcagcagagctagcggcgtgccagatagattttctggcagcggcagcgacaaggatttcaccctgaagatctccagagtggaaaccgaggacgtgggcacctactactgtatgcagggcagagagagcccctggacatttggccagggcaccaaggtggacatcaaaggtggcggtggttctggcggaggcggaagtggcggcggtgggtccggaggtggtggatctgaacctaagagcagcgacaagacccacacctgtcctccatgtcctgctccagaactgctcggcggaccttccgtgttcctgtttcctccaaagcctaaggacaccctgatgatcagcagaacccctgaagtgacctgcgtggtggtggatgtgtctcacgaggaccccgaagtgaagttcaattggtacgtggacggcgtggaagtgcacaacgccaagaccaagcctagagaggaacagtacaacagcacctacagagtggtgtccgtgctgacagtgctgcaccaggattggctgaacggcaaagagtacaagtgcaaggtgtccaacaaggccctgcctgctcctatcgagaaaaccatcagcaaggccaagggccagcctagggaaccccaggtttacaccctgcctccatgccgcgacgaactgaccaagaaccaggtgtccctgtggtgcctggtcaagggcttctacccttccgatatcgccgtggaatgggagagcaatggccagcctgagaacaactacaagacaacccctcctgtgctggacagcgacggctcattcttcctgtacagcaagctgacagtggacaagagcagatggcagcagggcaacgtgttcagctgcagcgtgctgcatgaagccctgcacagccactacacccagaagtccctgtctctgagccccggcaagtgataa

SEQ ID NO: 502 - DNA, 1638 bp, synthetic construct
  source 1..1638: mol_type = other DNA
atggattggatctggcgcatcctgtttctcgtgggagctgccacaggcgcccactctcaagttcacctgacacagtctggccccgaagtgcggaagcctggcacaagcgtgaaggtgtcctgtaaagcccctggcaacaccctgaaaacctacgacctgcactgggtccgatctgtgcctggacaaggactgcagtggatgggctggattagccacgagggcgacaagaaagtgatcgtggaacggttcaaggccaaagtgaccatcgactgggacagaagcaccaacaccgcctacctgcagctgagcggactgacatctggcgataccgccgtgtactactgtgccaagggcagcaagcaccggctgagagattacgccctgtacgacgatgacggcgccctgaattgggccgtcgatgtggactacctgagcaacctggaattctggggccagggaacagccgtgacagtgtcttccggtggcggaggaagcggaggcggaggttcaggcggcggaggctctggcggtggtggatctgattttgtgctgacacagagccctcacagcctgagcgttacacctggcgagagcgccagcatcagctgcaagtctagccactctctgatccacggcgaccggaacaactacctggcttggtacgtgcagaagcccggcagatctcctcagctgctgatctacctggccagcagcagagctagcggcgtgccagatagattttctggcagcggcagcgacaaggatttcaccctgaagatctccagagtggaaaccgaggacgtgggcacctactactgtatgcagggcagagagagcccctggacatttggccagggcaccaaggtggacatcaaaggtggcggtggttctggcggaggcggaagtggcggcggtgggtccggaggtggtggatctgaacctaagagcagcgacaagacccacacctgtcctccatgtcctgctccagaactgctggccggaccttccgtgttcctgtttcctccaaagcctaaggacaccctgatgatcagcagaacccctgaagtgacctgcgtggtggtggatgtgtctcacgaggaccccgaagtgaagttcaattggtacgtggacggcgtggaagtgcacaatgccaagaccaagcctagagaggaacagtacaacagcacctacagagtggtgtccgtgctgaccgtgctgcaccaggattggctgaacggcaaagagtacaagtgcaaggtgtccaacaaggccctgcctctgcctgaggaaaagaccatcagcaaggccaagggccagcctagggaaccccaggtttacaccctgcctccatgccgcgacgaactgaccaagaaccaggtgtccctgtggtgcctggtcaagggcttctacccttccgatatcgccgtggaatgggagagcaatggccagcctgagaacaactacaagacaacccctcctgtgctggacagcgacggctcattcttcctgtacagcaagctgacagtggacaagagcagatggcagcagggcaacgtgttcagctgcagcgtgctgcatgaagccctgcacagccactacacccagaagtccctgtctctgagccccggcaagtgataa

SEQ ID NO: 503 - DNA, 1638 bp, synthetic construct
  source 1..1638: mol_type = other DNA
atggattggatctggcgcatcctgtttctcgtgggagctgccacaggcgcccactctcaagttcacctgacacagtctggccccgaagtgcggaagcctggcacaagcgtgaaggtgtcctgtaaagcccctggcaacaccctgaaaacctacgacctgcactgggtccgatctgtgcctggacaaggactgcagtggatgggctggattagccacgagggcgacaagaaagtgatcgtggaacggttcaaggccaaagtgaccatcgactgggacagaagcaccaacaccgcctacctgcagctgagcggactgacatctggcgataccgccgtgtactactgtgccaagggcagcaagcaccggctgagagattacgccctgtacgacgatgacggcgccctgaattgggccgtcgatgtggactacctgagcaacctggaattctggggccagggaacagccgtgacagtgtcttccggtggcggaggaagcggaggcggaggttcaggcggcggaggctctggcggtggtggatctgattttgtgctgacacagagccctcacagcctgagcgttacacctggcgagagcgccagcatcagctgcaagtctagccactctctgatccacggcgaccggaacaactacctggcttggtacgtgcagaagcccggcagatctcctcagctgctgatctacctggccagcagcagagctagcggcgtgccagatagattttctggcagcggcagcgacaaggatttcaccctgaagatctccagagtggaaaccgaggacgtgggcacctactactgtatgcagggcagagagagcccctggacatttggccagggcaccaaggtggacatcaaaggtggcggtggttctggcggaggcggaagtggcggcggtgggtccggaggtggtggatctgaacctaagagcagcgacaagacccacacctgtcctccatgtcctgctccagaactgctggccggaccttccgtgttcctgtttcctccaaagcctaaggacaccctgatgatcagcagaacccctgaagtgacctgcgtggtggtggatgtgtctcacgaggaccctgaagtgaagttcaattggtacgtggacggcgtggaagtgcacaacgccaagaccaagcctagagaggaacagtacaacagcacctacagagtggtgtccgtgctgaccgtgctgcaccaggattggctgaacggcaaagagtacaagtgcaaggtgtccaacaaggccctgcctgcccctgaggaaaagaccatcagcaaggccaagggccagcctagggaaccccaggtttacaccctgcctccatgccgcgacgaactgaccaagaaccaggtgtccctgtggtgcctggtcaagggcttctacccttccgatatcgccgtggaatgggagagcaatggccagcctgagaacaactacaagacaacccctcctgtgctggacagcgacggctcattcttcctgtacagcaagctgacagtggacaagagcagatggcagcagggcaacgtgttcagctgcagcgtgctgcatgaagccctgcacagccactacacccagaagtccctgtctctgagccccggcaagtgataa

SEQ ID NO: 504 - DNA, 1638 bp, synthetic construct
  source 1..1638: mol_type = other DNA
atggattggatctggcgcatcctgtttctcgtgggagctgccacaggcgcccactctcaagttcacctgacacagtctggccccgaagtgcggaagcctggcacaagcgtgaaggtgtcctgtaaagcccctggcaacaccctgaaaacctacgacctgcactgggtccgatctgtgcctggacaaggactgcagtggatgggctggattagccacgagggcgacaagaaagtgatcgtggaacggttcaaggccaaagtgaccatcgactgggacagaagcaccaacaccgcctacctgcagctgagcggactgacatctggcgataccgccgtgtactactgtgccaagggcagcaagcaccggctgagagattacgccctgtacgacgatgacggcgccctgaattgggccgtcgatgtggactacctgagcaacctggaattctggggccagggaacagccgtgacagtgtcttccggtggcggaggaagcggaggcggaggttcaggcggcggaggctctggcggtggtggatctgattttgtgctgacacagagccctcacagcctgagcgttacacctggcgagagcgccagcatcagctgcaagtctagccactctctgatccacggcgaccggaacaactacctggcttggtacgtgcagaagcccggcagatctcctcagctgctgatctacctggccagcagcagagctagcggcgtgccagatagattttctggcagcggcagcgacaaggatttcaccctgaagatctccagagtggaaaccgaggacgtgggcacctactactgtatgcagggcagagagagcccctggacatttggccagggcaccaaggtggacatcaaaggtggcggtggttctggcggaggcggaagtggcggcggtgggtccggaggtggtggatctgaacctaagagcagcgacaagacccacacctgtcctccatgtcctgctccagaactgctggccggaccttccgtgttcctgtttcctccaaagcctaaggacaccctgatgatcagcagaacccctgaagtgacctgcgtggtggtggatgtgtctcacgaggaccctgaagtgaagttcaattggtacgtggacggcgtggaagtgcacaacgccaagaccaagcctagagaggaacagtacaacagcacctacagagtggtgtccgtgctgaccgtgctgcaccaggattggctgaacggcaaagagtacaagtgcaaggtgtccaacaaggccctgcctgcccctatcgaaaagaccatcagcaaggccaagggccagcctagggaaccccaggtttacaccctgcctccatgccgcgacgaactgaccaagaaccaggtgtccctgtggtgcctggtcaagggcttctacccttccgatatcgccgtggaatgggagagcaatggccagcctgagaacaactacaagacaacccctcctgtgctggacagcgacggctcattcttcctgtacagcaagctgacagtggacaagagcagatggcagcagggcaacgtgttcagctgcagcgtgctgcatgaagccctgcacagccactacacccagaagtccctgtctctgagccccggcaagtgataa

SEQ ID NO: 505 - DNA, 1638 bp, synthetic construct
  source 1..1638: mol_type = other DNA
atggattggatctggcgcatcctgtttctcgtgggagctgccacaggcgcccactctcaagttcacctgacacagtctggccccgaagtgcggaagcctggcacaagcgtgaaggtgtcctgtaaagcccctggcaacaccctgaaaacctacgacctgcactgggtccgatctgtgcctggacaaggactgcagtggatgggctggattagccacgagggcgacaagaaagtgatcgtggaacggttcaaggccaaagtgaccatcgactgggacagaagcaccaacaccgcctacctgcagctgagcggactgacatctggcgataccgccgtgtactactgtgccaagggcagcaagcaccggctgagagattacgccctgtacgacgatgacggcgccctgaattgggccgtcgatgtggactacctgagcaacctggaattctggggccagggaacagccgtgacagtgtcttccggtggcggaggaagcggaggcggaggttcaggcggcggaggctctggcggtggtggatctgattttgtgctgacacagagccctcacagcctgagcgttacacctggcgagagcgccagcatcagctgcaagtctagccactctctgatccacggcgaccggaacaactacctggcttggtacgtgcagaagcccggcagatctcctcagctgctgatctacctggccagcagcagagctagcggcgtgccagatagattttctggcagcggcagcgacaaggatttcaccctgaagatctccagagtggaaaccgaggacgtgggcacctactactgtatgcagggcagagagagcccctggacatttggccagggcaccaaggtggacatcaaaggtggcggtggttctggcggaggcggaagtggcggcggtgggtccggaggtggtggatctgaacctaagagcagcgacaagacccacacctgtcctccatgtcctgctccagaactgctgggcggaccttccgtgttcctgtttcctccaaagcctaaggacaccctgatgatcagcagaacccctgaagtgacctgcgtggtggtggatgtgtctcacgaggaccctgaagtgaagttcaattggtacgtggacggcgtggaagtgcacaacgccaagaccaagcctagagaggaacagtacaacagcacctacagagtggtgtccgtgctgaccgtgctgcaccaggattggctgaacggcaaagagtacaagtgcaaggtgtccaacaaggccctgcctgcccctgaggaaaagaccatcagcaaggccaagggccagcctagggaaccccaggtttacaccctgcctccatgccgcgacgaactgaccaagaaccaggtgtccctgtggtgcctggtcaagggcttctacccttccgatatcgccgtggaatgggagagcaatggccagcctgagaacaactacaagacaacccctcctgtgctggacagcgacggctcattcttcctgtacagcaagctgacagtggacaagagcagatggcagcagggcaacgtgttcagctgcagcgtgctgcatgaagccctgcacagccactacacccagaagtccctgtctctgagccccggcaagtgataa

SEQ ID NO: 506 - DNA, 1638 bp, synthetic construct
  source 1..1638: mol_type = other DNA
atggattggatctggcgcatcctgtttctcgtgggagctgccacaggcgcccactctgattttgtgctgacacagtctccccacagcctgagcgttacacctggcgagtctgccagcatcagctgcaagtctagccactctctgatccacggcgaccggaacaactacctggcttggtacgtgcagaagcccggcagatctcctcagctgctgatctacctggccagcagcagagcttctggcgtgcccgatagattttctggcagcggcagcgacaaggacttcaccctgaagatctccagagtggaaaccgaggacgtgggcacctactactgtatgcagggcagagagagcccctggacatttggccagggcaccaaggtggacatcaaaggcggcggaggaagcggaggcggaggttctggtggcggaggctcaggcggtggcggatctcaagttcatctgacacagagcggccctgaagtgcggaagcctggcacaagcgtgaaggtgtcctgtaaagcccctggcaacaccctgaaaacctacgacctgcactgggtccgatctgtgcctggacagggactgcaatggatgggctggattagccacgagggcgacaagaaagtgatcgtggaacggttcaaggccaaagtgaccatcgactgggacagaagcaccaacaccgcctacctgcagctgagcggactgacatctggcgataccgccgtgtactactgtgccaagggcagcaagcaccggctgagagattacgccctgtacgacgatgacggcgccctgaattgggccgtcgatgtggactacctgagcaacctggaattctggggccagggaacagccgtgacagtgtcttccggcggaggtggaagtggtggtggcggtagcggaggcggtgggtccggaggtggtggatctgaacctaagagcagcgacaagacccacacctgtcctccatgtcctgctccagaactgctcggcggaccttccgtgttcctgtttcctccaaagcctaaggacaccctgatgatcagcagaacccctgaagtgacctgcgtggtggtggatgtgtctcacgaggaccccgaagtgaagttcaattggtacgtggacggcgtggaagtgcacaacgccaagaccaagcctagagaggaacagtacaacagcacctacagagtggtgtccgtgctgacagtgctgcaccaggattggctgaacggcaaagagtacaagtgcaaggtgtccaacaaggccctgcctgctcctatcgagaaaaccatcagcaaggccaagggccagcctagggaaccccaggtttacacactgcctccaagccgcgaggaaatgaccaagaaccaggtgtccctgacctgcctcgtgaagggcttctacccttccgatatcgccgtggaatgggagagcaatggccagcctgagaacaactacaagacaacccctcctgtgctggacagcgacggctcattcttcctgtacagcaagctgactgtggataagtcccggtggcagcagggcaacgtgttcagctgttctgtgatgcacgaagccctgcacaaccactacacccagaaaagcctgtctctgagccccggcaagtgataa

SEQ ID NO: 507 - DNA, 1638 bp, synthetic construct
  source 1..1638: mol_type = other DNA
atggattggatctggcgcatcctgtttctcgtgggagctgccacaggcgcccactctgattttgtgctgacacagtctccccacagcctgagcgttacacctggcgagtctgccagcatcagctgcaagtctagccactctctgatccacggcgaccggaacaactacctggcttggtacgtgcagaagcccggcagatctcctcagctgctgatctacctggccagcagcagagcttctggcgtgcccgatagattttctggcagcggcagcgacaaggacttcaccctgaagatctccagagtggaaaccgaggacgtgggcacctactactgtatgcagggcagagagagcccctggacatttggccagggcaccaaggtggacatcaaaggcggcggaggaagcggaggcggaggttctggtggcggaggctcaggcggtggcggatctcaagttcatctgacacagagcggccctgaagtgcggaagcctggcacaagcgtgaaggtgtcctgtaaagcccctggcaacaccctgaaaacctacgacctgcactgggtccgatctgtgcctggacagggactgcaatggatgggctggattagccacgagggcgacaagaaagtgatcgtggaacggttcaaggccaaagtgaccatcgactgggacagaagcaccaacaccgcctacctgcagctgagcggactgacatctggcgataccgccgtgtactactgtgccaagggcagcaagcaccggctgagagattacgccctgtacgacgatgacggcgccctgaattgggccgtcgatgtggactacctgagcaacctggaattctggggccagggaacagccgtgacagtgtcttccggcggaggtggaagtggtggtggcggtagcggaggcggtgggtccggaggtggtggatctgaacctaagagcagcgacaagacccacacctgtcctccatgtcctgctccagaactgctcggcggaccttccgtgttcctgtttcctccaaagcctaaggacaccctgatgatcagcagaacccctgaagtgacctgcgtggtggtggatgtgtctcacgaggaccccgaagtgaagttcaattggtacgtggacggcgtggaagtgcacaacgccaagaccaagcctagagaggaacagtacaacagcacctacagagtggtgtccgtgctgacagtgctgcaccaggattggctgaacggcaaagagtacaagtgcaaggtgtccaacaaggccctgcctgctcctatcgagaaaaccatcagcaaggccaagggccagcctagggaaccccaggtttacacactgcctccaagccgcgaggaaatgaccaagaaccaggtgtccctgacctgcctcgtgaagggcttctacccttccgatatcgccgtggaatgggagagcaatggccagcctgagaacaactacaagacaacccctcctgtgctggacagcgacggctcattcttcctgtacagcaagctgaccgtggacaagtccagatggcagcagggcaacgtgttcagctgtagcgtgctgcacgaagccctgcacagccactacacccagaaaagcctgtctctgagccccggcaaatgataa

SEQ ID NO: 508 - DNA, 1638 bp, synthetic construct
  source 1..1638: mol_type = other DNA
atggattggatctggcgcatcctgtttctcgtgggagctgccacaggcgcccactctgattttgtgctgacacagtctccccacagcctgagcgttacacctggcgagtctgccagcatcagctgcaagtctagccactctctgatccacggcgaccggaacaactacctggcttggtacgtgcagaagcccggcagatctcctcagctgctgatctacctggccagcagcagagcttctggcgtgcccgatagattttctggcagcggcagcgacaaggacttcaccctgaagatctccagagtggaaaccgaggacgtgggcacctactactgtatgcagggcagagagagcccctggacatttggccagggcaccaaggtggacatcaaaggcggcggaggaagcggaggcggaggttctggtggcggaggctcaggcggtggcggatctcaagttcatctgacacagagcggccctgaagtgcggaagcctggcacaagcgtgaaggtgtcctgtaaagcccctggcaacaccctgaaaacctacgacctgcactgggtccgatctgtgcctggacagggactgcaatggatgggctggattagccacgagggcgacaagaaagtgatcgtggaacggttcaaggccaaagtgaccatcgactgggacagaagcaccaacaccgcctacctgcagctgagcggactgacatctggcgataccgccgtgtactactgtgccaagggcagcaagcaccggctgagagattacgccctgtacgacgatgacggcgccctgaattgggccgtcgatgtggactacctgagcaacctggaattctggggccagggaacagccgtgacagtgtcttccggcggaggtggaagtggtggtggcggtagcggaggcggtgggtccggaggtggtggatctgaacctaagagcagcgacaagacccacacctgtcctccatgtcctgctccagaactgctggccggaccttccgtgttcctgtttcctccaaagcctaaggacaccctgatgatcagcagaacccctgaagtgacctgcgtggtggtggatgtgtctcacgaggaccccgaagtgaagttcaattggtacgtggacggcgtggaagtgcacaatgccaagaccaagcctagagaggaacagtacaacagcacctacagagtggtgtccgtgctgaccgtgctgcaccaggattggctgaacggcaaagagtacaagtgcaaggtgtccaacaaggccctgcctctgcctgaggaaaagaccatcagcaaggccaagggccagcctagggaaccccaggtttacacactgcctccaagccgcgaggaaatgaccaagaaccaggtgtccctgacctgcctcgtgaagggcttctacccttccgatatcgccgtggaatgggagagcaatggccagcctgagaacaactacaagacaacccctcctgtgctggacagcgacggctcattcttcctgtacagcaagctgaccgtggacaagtccagatggcagcagggcaacgtgttcagctgtagcgtgctgcacgaagccctgcacagccactacacccagaaaagcctgtctctgagccccggcaaatgataa

SEQ ID NO: 509 - DNA, 1638 bp, synthetic construct
  source 1..1638: mol_type = other DNA
atggattggatctggcgcatcctgtttctcgtgggagctgccacaggcgcccactctgattttgtgctgacacagtctccccacagcctgagcgttacacctggcgagtctgccagcatcagctgcaagtctagccactctctgatccacggcgaccggaacaactacctggcttggtacgtgcagaagcccggcagatctcctcagctgctgatctacctggccagcagcagagcttctggcgtgcccgatagattttctggcagcggcagcgacaaggacttcaccctgaagatctccagagtggaaaccgaggacgtgggcacctactactgtatgcagggcagagagagcccctggacatttggccagggcaccaaggtggacatcaaaggcggcggaggaagcggaggcggaggttctggtggcggaggctcaggcggtggcggatctcaagttcatctgacacagagcggccctgaagtgcggaagcctggcacaagcgtgaaggtgtcctgtaaagcccctggcaacaccctgaaaacctacgacctgcactgggtccgatctgtgcctggacagggactgcaatggatgggctggattagccacgagggcgacaagaaagtgatcgtggaacggttcaaggccaaagtgaccatcgactgggacagaagcaccaacaccgcctacctgcagctgagcggactgacatctggcgataccgccgtgtactactgtgccaagggcagcaagcaccggctgagagattacgccctgtacgacgatgacggcgccctgaattgggccgtcgatgtggactacctgagcaacctggaattctggggccagggaacagccgtgacagtgtcttccggcggaggtggaagtggtggtggcggtagcggaggcggtgggtccggaggtggtggatctgaacctaagagcagcgacaagacccacacctgtcctccatgtcctgctccagaactgctggccggaccttccgtgttcctgtttcctccaaagcctaaggacaccctgatgatcagcagaacccctgaagtgacctgcgtggtggtggatgtgtctcacgaggaccctgaagtgaagttcaattggtacgtggacggcgtggaagtgcacaacgccaagaccaagcctagagaggaacagtacaacagcacctacagagtggtgtccgtgctgaccgtgctgcaccaggattggctgaacggcaaagagtacaagtgcaaggtgtccaacaaggccctgcctgcccctgaggaaaagaccatcagcaaggccaagggccagcctagggaaccccaggtttacacactgcctccaagccgcgaggaaatgaccaagaaccaggtgtccctgacctgcctcgtgaagggcttctacccttccgatatcgccgtggaatgggagagcaatggccagcctgagaacaactacaagacaacccctcctgtgctggacagcgacggctcattcttcctgtacagcaagctgaccgtggacaagtccagatggcagcagggcaacgtgttcagctgtagcgtgctgcacgaagccctgcacagccactacacccagaaaagcctgtctctgagccccggcaaatgataa

SEQ ID NO: 510 - DNA, 1638 bp, synthetic construct
  source 1..1638: mol_type = other DNA
atggattggatctggcgcatcctgtttctcgtgggagctgccacaggcgcccactctgattttgtgctgacacagtctccccacagcctgagcgttacacctggcgagtctgccagcatcagctgcaagtctagccactctctgatccacggcgaccggaacaactacctggcttggtacgtgcagaagcccggcagatctcctcagctgctgatctacctggccagcagcagagcttctggcgtgcccgatagattttctggcagcggcagcgacaaggacttcaccctgaagatctccagagtggaaaccgaggacgtgggcacctactactgtatgcagggcagagagagcccctggacatttggccagggcaccaaggtggacatcaaaggcggcggaggaagcggaggcggaggttctggtggcggaggctcaggcggtggcggatctcaagttcatctgacacagagcggccctgaagtgcggaagcctggcacaagcgtgaaggtgtcctgtaaagcccctggcaacaccctgaaaacctacgacctgcactgggtccgatctgtgcctggacagggactgcaatggatgggctggattagccacgagggcgacaagaaagtgatcgtggaacggttcaaggccaaagtgaccatcgactgggacagaagcaccaacaccgcctacctgcagctgagcggactgacatctggcgataccgccgtgtactactgtgccaagggcagcaagcaccggctgagagattacgccctgtacgacgatgacggcgccctgaattgggccgtcgatgtggactacctgagcaacctggaattctggggccagggaacagccgtgacagtgtcttccggcggaggtggaagtggtggtggcggtagcggaggcggtgggtccggaggtggtggatctgaacctaagagcagcgacaagacccacacctgtcctccatgtcctgctccagaactgctggccggaccttccgtgttcctgtttcctccaaagcctaaggacaccctgatgatcagcagaacccctgaagtgacctgcgtggtggtggatgtgtctcacgaggaccctgaagtgaagttcaattggtacgtggacggcgtggaagtgcacaacgccaagaccaagcctagagaggaacagtacaacagcacctacagagtggtgtccgtgctgaccgtgctgcaccaggattggctgaacggcaaagagtacaagtgcaaggtgtccaacaaggccctgcctgcccctatcgaaaagaccatcagcaaggccaagggccagcctagggaaccccaggtttacacactgcctccaagccgcgaggaaatgaccaagaaccaggtgtccctgacctgcctcgtgaagggcttctacccttccgatatcgccgtggaatgggagagcaatggccagcctgagaacaactacaagacaacccctcctgtgctggacagcgacggctcattcttcctgtacagcaagctgaccgtggacaagtccagatggcagcagggcaacgtgttcagctgtagcgtgctgcacgaagccctgcacagccactacacccagaaaagcctgtctctgagccccggcaaatgataa

SEQ ID NO: 511 - DNA, 1638 bp, synthetic construct
  source 1..1638: mol_type = other DNA
atggattggatctggcgcatcctgtttctcgtgggagctgccacaggcgcccactctgattttgtgctgacacagtctccccacagcctgagcgttacacctggcgagtctgccagcatcagctgcaagtctagccactctctgatccacggcgaccggaacaactacctggcttggtacgtgcagaagcccggcagatctcctcagctgctgatctacctggccagcagcagagcttctggcgtgcccgatagattttctggcagcggcagcgacaaggacttcaccctgaagatctccagagtggaaaccgaggacgtgggcacctactactgtatgcagggcagagagagcccctggacatttggccagggcaccaaggtggacatcaaaggcggcggaggaagcggaggcggaggttctggtggcggaggctcaggcggtggcggatctcaagttcatctgacacagagcggccctgaagtgcggaagcctggcacaagcgtgaaggtgtcctgtaaagcccctggcaacaccctgaaaacctacgacctgcactgggtccgatctgtgcctggacagggactgcaatggatgggctggattagccacgagggcgacaagaaagtgatcgtggaacggttcaaggccaaagtgaccatcgactgggacagaagcaccaacaccgcctacctgcagctgagcggactgacatctggcgataccgccgtgtactactgtgccaagggcagcaagcaccggctgagagattacgccctgtacgacgatgacggcgccctgaattgggccgtcgatgtggactacctgagcaacctggaattctggggccagggaacagccgtgacagtgtcttccggcggaggtggaagtggtggtggcggtagcggaggcggtgggtccggaggtggtggatctgaacctaagagcagcgacaagacccacacctgtcctccatgtcctgctccagaactgctgggcggaccttccgtgttcctgtttcctccaaagcctaaggacaccctgatgatcagcagaacccctgaagtgacctgcgtggtggtggatgtgtctcacgaggaccctgaagtgaagttcaattggtacgtggacggcgtggaagtgcacaacgccaagaccaagcctagagaggaacagtacaacagcacctacagagtggtgtccgtgctgaccgtgctgcaccaggattggctgaacggcaaagagtacaagtgcaaggtgtccaacaaggccctgcctgcccctgaggaaaagaccatcagcaaggccaagggccagcctagggaaccccaggtttacacactgcctccaagccgcgaggaaatgaccaagaaccaggtgtccctgacctgcctcgtgaagggcttctacccttccgatatcgccgtggaatgggagagcaatggccagcctgagaacaactacaagacaacccctcctgtgctggacagcgacggctcattcttcctgtacagcaagctgaccgtggacaagtccagatggcagcagggcaacgtgttcagctgtagcgtgctgcacgaagccctgcacagccactacacccagaaaagcctgtctctgagccccggcaaatgataa

SEQ ID NO: 512 - DNA, 1638 bp, synthetic construct
  source 1..1638: mol_type = other DNA
atggattggatctggcgcatcctgtttctcgtgggagctgccacaggcgcccactctgattttgtgctgacacagtctccccacagcctgagcgttacacctggcgagtctgccagcatcagctgcaagtctagccactctctgatccacggcgaccggaacaactacctggcttggtacgtgcagaagcccggcagatctcctcagctgctgatctacctggccagcagcagagcttctggcgtgcccgatagattttctggcagcggcagcgacaaggacttcaccctgaagatctccagagtggaaaccgaggacgtgggcacctactactgtatgcagggcagagagagcccctggacatttggccagggcaccaaggtggacatcaaaggcggcggaggaagcggaggcggaggttctggtggcggaggctcaggcggtggcggatctcaagttcatctgacacagagcggccctgaagtgcggaagcctggcacaagcgtgaaggtgtcctgtaaagcccctggcaacaccctgaaaacctacgacctgcactgggtccgatctgtgcctggacagggactgcaatggatgggctggattagccacgagggcgacaagaaagtgatcgtggaacggttcaaggccaaagtgaccatcgactgggacagaagcaccaacaccgcctacctgcagctgagcggactgacatctggcgataccgccgtgtactactgtgccaagggcagcaagcaccggctgagagattacgccctgtacgacgatgacggcgccctgaattgggccgtcgatgtggactacctgagcaacctggaattctggggccagggaacagccgtgacagtgtcttccggcggaggtggaagtggtggtggcggtagcggaggcggtgggtccggaggtggtggatctgaacctaagagcagcgacaagacccacacctgtcctccatgtcctgctccagaactgctcggcggaccttccgtgttcctgtttcctccaaagcctaaggacaccctgatgatcagcagaacccctgaagtgacctgcgtggtggtggatgtgtctcacgaggaccccgaagtgaagttcaattggtacgtggacggcgtggaagtgcacaacgccaagaccaagcctagagaggaacagtacaacagcacctacagagtggtgtccgtgctgacagtgctgcaccaggattggctgaacggcaaagagtacaagtgcaaggtgtccaacaaggccctgcctgctcctatcgagaaaaccatcagcaaggccaagggccagcctagggaaccccaagtctgtacactgcctcctagccgcgaggaaatgaccaagaaccaggtgtccctgagctgcgccgtgaagggcttttacccttccgatatcgccgtggaatgggagagcaatggccagcctgagaacaactacaagacaacccctcctgtgctggacagcgacggctcattcttcctggtgtccaagctgacagtggacaagagcagatggcagcagggcaacgtgttcagctgctctgtgctgcacgaagccctgcacagccactacacccagaagtccctgtctctgagccccggcaagtgataa

SEQ ID NO: 513 - DNA, 1638 bp, synthetic construct
  source 1..1638: mol_type = other DNA
atggattggatctggcgcatcctgtttctcgtgggagctgccacaggcgcccactctgattttgtgctgacacagtctccccacagcctgagcgttacacctggcgagtctgccagcatcagctgcaagtctagccactctctgatccacggcgaccggaacaactacctggcttggtacgtgcagaagcccggcagatctcctcagctgctgatctacctggccagcagcagagcttctggcgtgcccgatagattttctggcagcggcagcgacaaggacttcaccctgaagatctccagagtggaaaccgaggacgtgggcacctactactgtatgcagggcagagagagcccctggacatttggccagggcaccaaggtggacatcaaaggcggcggaggaagcggaggcggaggttctggtggcggaggctcaggcggtggcggatctcaagttcatctgacacagagcggccctgaagtgcggaagcctggcacaagcgtgaaggtgtcctgtaaagcccctggcaacaccctgaaaacctacgacctgcactgggtccgatctgtgcctggacagggactgcaatggatgggctggattagccacgagggcgacaagaaagtgatcgtggaacggttcaaggccaaagtgaccatcgactgggacagaagcaccaacaccgcctacctgcagctgagcggactgacatctggcgataccgccgtgtactactgtgccaagggcagcaagcaccggctgagagattacgccctgtacgacgatgacggcgccctgaattgggccgtcgatgtggactacctgagcaacctggaattctggggccagggaacagccgtgacagtgtcttccggcggaggtggaagtggtggtggcggtagcggaggcggtgggtccggaggtggtggatctgaacctaagagcagcgacaagacccacacctgtcctccatgtcctgctccagaactgctggccggaccttccgtgttcctgtttcctccaaagcctaaggacaccctgatgatcagcagaacccctgaagtgacctgcgtggtggtggatgtgtctcacgaggaccccgaagtgaagttcaattggtacgtggacggcgtggaagtgcacaatgccaagaccaagcctagagaggaacagtacaacagcacctacagagtggtgtccgtgctgaccgtgctgcaccaggattggctgaacggcaaagagtacaagtgcaaggtgtccaacaaggccctgcctctgcctgaggaaaagaccatcagcaaggccaagggccagcctagggaaccccaagtctgtacactgcctcctagccgcgaggaaatgaccaagaaccaggtgtccctgagctgcgccgtgaagggcttttacccttccgatatcgccgtggaatgggagagcaatggccagcctgagaacaactacaagacaacccctcctgtgctggacagcgacggctcattcttcctggtgtccaagctgacagtggacaagagcagatggcagcagggcaacgtgttcagctgctctgtgctgcacgaagccctgcacagccactacacccagaagtccctgtctctgagccccggcaagtgataa

SEQ ID NO: 514 - DNA, 1638 bp, synthetic construct
  source 1..1638: mol_type = other DNA
atggattggatctggcgcatcctgtttctcgtgggagctgccacaggcgcccactctgattttgtgctgacacagtctccccacagcctgagcgttacacctggcgagtctgccagcatcagctgcaagtctagccactctctgatccacggcgaccggaacaactacctggcttggtacgtgcagaagcccggcagatctcctcagctgctgatctacctggccagcagcagagcttctggcgtgcccgatagattttctggcagcggcagcgacaaggacttcaccctgaagatctccagagtggaaaccgaggacgtgggcacctactactgtatgcagggcagagagagcccctggacatttggccagggcaccaaggtggacatcaaaggcggcggaggaagcggaggcggaggttctggtggcggaggctcaggcggtggcggatctcaagttcatctgacacagagcggccctgaagtgcggaagcctggcacaagcgtgaaggtgtcctgtaaagcccctggcaacaccctgaaaacctacgacctgcactgggtccgatctgtgcctggacagggactgcaatggatgggctggattagccacgagggcgacaagaaagtgatcgtggaacggttcaaggccaaagtgaccatcgactgggacagaagcaccaacaccgcctacctgcagctgagcggactgacatctggcgataccgccgtgtactactgtgccaagggcagcaagcaccggctgagagattacgccctgtacgacgatgacggcgccctgaattgggccgtcgatgtggactacctgagcaacctggaattctggggccagggaacagccgtgacagtgtcttccggcggaggtggaagtggtggtggcggtagcggaggcggtgggtccggaggtggtggatctgaacctaagagcagcgacaagacccacacctgtcctccatgtcctgctccagaactgctggccggaccttccgtgttcctgtttcctccaaagcctaaggacaccctgatgatcagcagaacccctgaagtgacctgcgtggtggtggatgtgtctcacgaggaccctgaagtgaagttcaattggtacgtggacggcgtggaagtgcacaacgccaagaccaagcctagagaggaacagtacaacagcacctacagagtggtgtccgtgctgaccgtgctgcaccaggattggctgaacggcaaagagtacaagtgcaaggtgtccaacaaggccctgcctgcccctgaggaaaagaccatcagcaaggccaagggccagcctagggaaccccaagtctgtacactgcctcctagccgcgaggaaatgaccaagaaccaggtgtccctgagctgcgccgtgaagggcttttacccttccgatatcgccgtggaatgggagagcaatggccagcctgagaacaactacaagacaacccctcctgtgctggacagcgacggctcattcttcctggtgtccaagctgacagtggacaagagcagatggcagcagggcaacgtgttcagctgctctgtgctgcacgaagccctgcacagccactacacccagaagtccctgtctctgagccccggcaagtgataa

SEQ ID NO: 515 - DNA, 1638 bp, synthetic construct
  source 1..1638: mol_type = other DNA
atggattggatctggcgcatcctgtttctcgtgggagctgccacaggcgcccactctgattttgtgctgacacagtctccccacagcctgagcgttacacctggcgagtctgccagcatcagctgcaagtctagccactctctgatccacggcgaccggaacaactacctggcttggtacgtgcagaagcccggcagatctcctcagctgctgatctacctggccagcagcagagcttctggcgtgcccgatagattttctggcagcggcagcgacaaggacttcaccctgaagatctccagagtggaaaccgaggacgtgggcacctactactgtatgcagggcagagagagcccctggacatttggccagggcaccaaggtggacatcaaaggcggcggaggaagcggaggcggaggttctggtggcggaggctcaggcggtggcggatctcaagttcatctgacacagagcggccctgaagtgcggaagcctggcacaagcgtgaaggtgtcctgtaaagcccctggcaacaccctgaaaacctacgacctgcactgggtccgatctgtgcctggacagggactgcaatggatgggctggattagccacgagggcgacaagaaagtgatcgtggaacggttcaaggccaaagtgaccatcgactgggacagaagcaccaacaccgcctacctgcagctgagcggactgacatctggcgataccgccgtgtactactgtgccaagggcagcaagcaccggctgagagattacgccctgtacgacgatgacggcgccctgaattgggccgtcgatgtggactacctgagcaacctggaattctggggccagggaacagccgtgacagtgtcttccggcggaggtggaagtggtggtggcggtagcggaggcggtgggtccggaggtggtggatctgaacctaagagcagcgacaagacccacacctgtcctccatgtcctgctccagaactgctggccggaccttccgtgttcctgtttcctccaaagcctaaggacaccctgatgatcagcagaacccctgaagtgacctgcgtggtggtggatgtgtctcacgaggaccctgaagtgaagttcaattggtacgtggacggcgtggaagtgcacaacgccaagaccaagcctagagaggaacagtacaacagcacctacagagtggtgtccgtgctgaccgtgctgcaccaggattggctgaacggcaaagagtacaagtgcaaggtgtccaacaaggccctgcctgcccctatcgaaaagaccatcagcaaggccaagggccagcctagggaaccccaagtctgtacactgcctcctagccgcgaggaaatgaccaagaaccaggtgtccctgagctgcgccgtgaagggcttttacccttccgatatcgccgtggaatgggagagcaatggccagcctgagaacaactacaagacaacccctcctgtgctggacagcgacggctcattcttcctggtgtccaagctgacagtggacaagagcagatggcagcagggcaacgtgttcagctgctctgtgctgcacgaagccctgcacagccactacacccagaagtccctgtctctgagccccggcaagtgataa

SEQ ID NO: 516 - DNA, 1638 bp, synthetic construct
  source 1..1638: mol_type = other DNA
atggattggatctggcgcatcctgtttctcgtgggagctgccacaggcgcccactctgattttgtgctgacacagtctccccacagcctgagcgttacacctggcgagtctgccagcatcagctgcaagtctagccactctctgatccacggcgaccggaacaactacctggcttggtacgtgcagaagcccggcagatctcctcagctgctgatctacctggccagcagcagagcttctggcgtgcccgatagattttctggcagcggcagcgacaaggacttcaccctgaagatctccagagtggaaaccgaggacgtgggcacctactactgtatgcagggcagagagagcccctggacatttggccagggcaccaaggtggacatcaaaggcggcggaggaagcggaggcggaggttctggtggcggaggctcaggcggtggcggatctcaagttcatctgacacagagcggccctgaagtgcggaagcctggcacaagcgtgaaggtgtcctgtaaagcccctggcaacaccctgaaaacctacgacctgcactgggtccgatctgtgcctggacagggactgcaatggatgggctggattagccacgagggcgacaagaaagtgatcgtggaacggttcaaggccaaagtgaccatcgactgggacagaagcaccaacaccgcctacctgcagctgagcggactgacatctggcgataccgccgtgtactactgtgccaagggcagcaagcaccggctgagagattacgccctgtacgacgatgacggcgccctgaattgggccgtcgatgtggactacctgagcaacctggaattctggggccagggaacagccgtgacagtgtcttccggcggaggtggaagtggtggtggcggtagcggaggcggtgggtccggaggtggtggatctgaacctaagagcagcgacaagacccacacctgtcctccatgtcctgctccagaactgctgggcggaccttccgtgttcctgtttcctccaaagcctaaggacaccctgatgatcagcagaacccctgaagtgacctgcgtggtggtggatgtgtctcacgaggaccctgaagtgaagttcaattggtacgtggacggcgtggaagtgcacaacgccaagaccaagcctagagaggaacagtacaacagcacctacagagtggtgtccgtgctgaccgtgctgcaccaggattggctgaacggcaaagagtacaagtgcaaggtgtccaacaaggccctgcctgcccctgaggaaaagaccatcagcaaggccaagggccagcctagggaaccccaagtctgtacactgcctcctagccgcgaggaaatgaccaagaaccaggtgtccctgagctgcgccgtgaagggcttttacccttccgatatcgccgtggaatgggagagcaatggccagcctgagaacaactacaagacaacccctcctgtgctggacagcgacggctcattcttcctggtgtccaagctgacagtggacaagagcagatggcagcagggcaacgtgttcagctgctctgtgctgcacgaagccctgcacagccactacacccagaagtccctgtctctgagccccggcaagtgataa

SEQ ID NO: 517 - DNA, 1638 bp, synthetic construct
  source 1..1638: mol_type = other DNA
atggattggatctggcgcatcctgtttctcgtgggagctgccacaggcgcccactctgattttgtgctgacacagtctccccacagcctgagcgttacacctggcgagtctgccagcatcagctgcaagtctagccactctctgatccacggcgaccggaacaactacctggcttggtacgtgcagaagcccggcagatctcctcagctgctgatctacctggccagcagcagagcttctggcgtgcccgatagattttctggcagcggcagcgacaaggacttcaccctgaagatctccagagtggaaaccgaggacgtgggcacctactactgtatgcagggcagagagagcccctggacatttggccagggcaccaaggtggacatcaaaggcggcggaggaagcggaggcggaggttctggtggcggaggctcaggcggtggcggatctcaagttcatctgacacagagcggccctgaagtgcggaagcctggcacaagcgtgaaggtgtcctgtaaagcccctggcaacaccctgaaaacctacgacctgcactgggtccgatctgtgcctggacagggactgcaatggatgggctggattagccacgagggcgacaagaaagtgatcgtggaacggttcaaggccaaagtgaccatcgactgggacagaagcaccaacaccgcctacctgcagctgagcggactgacatctggcgataccgccgtgtactactgtgccaagggcagcaagcaccggctgagagattacgccctgtacgacgatgacggcgccctgaattgggccgtcgatgtggactacctgagcaacctggaattctggggccagggaacagccgtgacagtgtcttccggcggaggtggaagtggtggtggcggtagcggaggcggtgggtccggaggtggtggatctgaacctaagagcagcgacaagacccacacctgtcctccatgtcctgctccagaactgctcggcggaccttccgtgttcctgtttcctccaaagcctaaggacaccctgatgatcagcagaacccctgaagtgacctgcgtggtggtggatgtgtctcacgaggaccccgaagtgaagttcaattggtacgtggacggcgtggaagtgcacaacgccaagaccaagcctagagaggaacagtacaacagcacctacagagtggtgtccgtgctgacagtgctgcaccaggattggctgaacggcaaagagtacaagtgcaaggtgtccaacaaggccctgcctgctcctatcgagaaaaccatcagcaaggccaagggccagcctagggaaccccaggtttacaccctgcctccatgccgcgaggaaatgaccaagaaccaggtgtccctgtggtgcctcgtgaagggcttctacccttccgatatcgccgtggaatgggagagcaatggccagcctgagaacaactacaagacaacccctcctgtgctggacagcgacggctcattcttcctgtacagcaagctgaccgtggacaagtccagatggcagcagggcaacgtgttcagctgtagcgtgctgcacgaagccctgcacagccactacacccagaagtccctgtctctgagccccggcaagtgataa

SEQ ID NO: 518 - DNA, 1638 bp, synthetic construct
  source 1..1638: mol_type = other DNA
atggattggatctggcgcatcctgtttctcgtgggagctgccacaggcgcccactctgattttgtgctgacacagtctccccacagcctgagcgttacacctggcgagtctgccagcatcagctgcaagtctagccactctctgatccacggcgaccggaacaactacctggcttggtacgtgcagaagcccggcagatctcctcagctgctgatctacctggccagcagcagagcttctggcgtgcccgatagattttctggcagcggcagcgacaaggacttcaccctgaagatctccagagtggaaaccgaggacgtgggcacctactactgtatgcagggcagagagagcccctggacatttggccagggcaccaaggtggacatcaaaggcggcggaggaagcggaggcggaggttctggtggcggaggctcaggcggtggcggatctcaagttcatctgacacagagcggccctgaagtgcggaagcctggcacaagcgtgaaggtgtcctgtaaagcccctggcaacaccctgaaaacctacgacctgcactgggtccgatctgtgcctggacagggactgcaatggatgggctggattagccacgagggcgacaagaaagtgatcgtggaacggttcaaggccaaagtgaccatcgactgggacagaagcaccaacaccgcctacctgcagctgagcggactgacatctggcgataccgccgtgtactactgtgccaagggcagcaagcaccggctgagagattacgccctgtacgacgatgacggcgccctgaattgggccgtcgatgtggactacctgagcaacctggaattctggggccagggaacagccgtgacagtgtcttccggcggaggtggaagtggtggtggcggtagcggaggcggtgggtccggaggtggtggatctgaacctaagagcagcgacaagacccacacctgtcctccatgtcctgctccagaactgctggccggaccttccgtgttcctgtttcctccaaagcctaaggacaccctgatgatcagcagaacccctgaagtgacctgcgtggtggtggatgtgtctcacgaggaccccgaagtgaagttcaattggtacgtggacggcgtggaagtgcacaatgccaagaccaagcctagagaggaacagtacaacagcacctacagagtggtgtccgtgctgaccgtgctgcaccaggattggctgaacggcaaagagtacaagtgcaaggtgtccaacaaggccctgcctctgcctgaggaaaagaccatcagcaaggccaagggccagcctagggaaccccaggtttacaccctgcctccatgccgcgaggaaatgaccaagaaccaggtgtccctgtggtgcctcgtgaagggcttctacccttccgatatcgccgtggaatgggagagcaatggccagcctgagaacaactacaagacaacccctcctgtgctggacagcgacggctcattcttcctgtacagcaagctgaccgtggacaagtccagatggcagcagggcaacgtgttcagctgtagcgtgctgcacgaagccctgcacagccactacacccagaagtccctgtctctgagccccggcaagtgataa

SEQ ID NO: 519 - DNA, 1638 bp, synthetic construct
  source 1..1638: mol_type = other DNA
atggattggatctggcgcatcctgtttctcgtgggagctgccacaggcgcccactctgattttgtgctgacacagtctccccacagcctgagcgttacacctggcgagtctgccagcatcagctgcaagtctagccactctctgatccacggcgaccggaacaactacctggcttggtacgtgcagaagcccggcagatctcctcagctgctgatctacctggccagcagcagagcttctggcgtgcccgatagattttctggcagcggcagcgacaaggacttcaccctgaagatctccagagtggaaaccgaggacgtgggcacctactactgtatgcagggcagagagagcccctggacatttggccagggcaccaaggtggacatcaaaggcggcggaggaagcggaggcggaggttctggtggcggaggctcaggcggtggcggatctcaagttcatctgacacagagcggccctgaagtgcggaagcctggcacaagcgtgaaggtgtcctgtaaagcccctggcaacaccctgaaaacctacgacctgcactgggtccgatctgtgcctggacagggactgcaatggatgggctggattagccacgagggcgacaagaaagtgatcgtggaacggttcaaggccaaagtgaccatcgactgggacagaagcaccaacaccgcctacctgcagctgagcggactgacatctggcgataccgccgtgtactactgtgccaagggcagcaagcaccggctgagagattacgccctgtacgacgatgacggcgccctgaattgggccgtcgatgtggactacctgagcaacctggaattctggggccagggaacagccgtgacagtgtcttccggcggaggtggaagtggtggtggcggtagcggaggcggtgggtccggaggtggtggatctgaacctaagagcagcgacaagacccacacctgtcctccatgtcctgctccagaactgctggccggaccttccgtgttcctgtttcctccaaagcctaaggacaccctgatgatcagcagaacccctgaagtgacctgcgtggtggtggatgtgtctcacgaggaccctgaagtgaagttcaattggtacgtggacggcgtggaagtgcacaacgccaagaccaagcctagagaggaacagtacaacagcacctacagagtggtgtccgtgctgaccgtgctgcaccaggattggctgaacggcaaagagtacaagtgcaaggtgtccaacaaggccctgcctgcccctgaggaaaagaccatcagcaaggccaagggccagcctagggaaccccaggtttacaccctgcctccatgccgcgaggaaatgaccaagaaccaggtgtccctgtggtgcctcgtgaagggcttctacccttccgatatcgccgtggaatgggagagcaatggccagcctgagaacaactacaagacaacccctcctgtgctggacagcgacggctcattcttcctgtacagcaagctgaccgtggacaagtccagatggcagcagggcaacgtgttcagctgtagcgtgctgcacgaagccctgcacagccactacacccagaagtccctgtctctgagccccggcaagtgataa

SEQ ID NO: 520 - DNA, 1638 bp, synthetic construct
  source 1..1638: mol_type = other DNA
atggattggatctggcgcatcctgtttctcgtgggagctgccacaggcgcccactctgattttgtgctgacacagtctccccacagcctgagcgttacacctggcgagtctgccagcatcagctgcaagtctagccactctctgatccacggcgaccggaacaactacctggcttggtacgtgcagaagcccggcagatctcctcagctgctgatctacctggccagcagcagagcttctggcgtgcccgatagattttctggcagcggcagcgacaaggacttcaccctgaagatctccagagtggaaaccgaggacgtgggcacctactactgtatgcagggcagagagagcccctggacatttggccagggcaccaaggtggacatcaaaggcggcggaggaagcggaggcggaggttctggtggcggaggctcaggcggtggcggatctcaagttcatctgacacagagcggccctgaagtgcggaagcctggcacaagcgtgaaggtgtcctgtaaagcccctggcaacaccctgaaaacctacgacctgcactgggtccgatctgtgcctggacagggactgcaatggatgggctggattagccacgagggcgacaagaaagtgatcgtggaacggttcaaggccaaagtgaccatcgactgggacagaagcaccaacaccgcctacctgcagctgagcggactgacatctggcgataccgccgtgtactactgtgccaagggcagcaagcaccggctgagagattacgccctgtacgacgatgacggcgccctgaattgggccgtcgatgtggactacctgagcaacctggaattctggggccagggaacagccgtgacagtgtcttccggcggaggtggaagtggtggtggcggtagcggaggcggtgggtccggaggtggtggatctgaacctaagagcagcgacaagacccacacctgtcctccatgtcctgctccagaactgctggccggaccttccgtgttcctgtttcctccaaagcctaaggacaccctgatgatcagcagaacccctgaagtgacctgcgtggtggtggatgtgtctcacgaggaccctgaagtgaagttcaattggtacgtggacggcgtggaagtgcacaacgccaagaccaagcctagagaggaacagtacaacagcacctacagagtggtgtccgtgctgaccgtgctgcaccaggattggctgaacggcaaagagtacaagtgcaaggtgtccaacaaggccctgcctgcccctatcgaaaagaccatcagcaaggccaagggccagcctagggaaccccaggtttacaccctgcctccatgccgcgaggaaatgaccaagaaccaggtgtccctgtggtgcctcgtgaagggcttctacccttccgatatcgccgtggaatgggagagcaatggccagcctgagaacaactacaagacaacccctcctgtgctggacagcgacggctcattcttcctgtacagcaagctgaccgtggacaagtccagatggcagcagggcaacgtgttcagctgtagcgtgctgcacgaagccctgcacagccactacacccagaagtccctgtctctgagccccggcaagtgataa

SEQ ID NO: 521 - DNA, 1638 bp, synthetic construct
  source 1..1638: mol_type = other DNA
atggattggatctggcgcatcctgtttctcgtgggagctgccacaggcgcccactctgattttgtgctgacacagtctccccacagcctgagcgttacacctggcgagtctgccagcatcagctgcaagtctagccactctctgatccacggcgaccggaacaactacctggcttggtacgtgcagaagcccggcagatctcctcagctgctgatctacctggccagcagcagagcttctggcgtgcccgatagattttctggcagcggcagcgacaaggacttcaccctgaagatctccagagtggaaaccgaggacgtgggcacctactactgtatgcagggcagagagagcccctggacatttggccagggcaccaaggtggacatcaaaggcggcggaggaagcggaggcggaggttctggtggcggaggctcaggcggtggcggatctcaagttcatctgacacagagcggccctgaagtgcggaagcctggcacaagcgtgaaggtgtcctgtaaagcccctggcaacaccctgaaaacctacgacctgcactgggtccgatctgtgcctggacagggactgcaatggatgggctggattagccacgagggcgacaagaaagtgatcgtggaacggttcaaggccaaagtgaccatcgactgggacagaagcaccaacaccgcctacctgcagctgagcggactgacatctggcgataccgccgtgtactactgtgccaagggcagcaagcaccggctgagagattacgccctgtacgacgatgacggcgccctgaattgggccgtcgatgtggactacctgagcaacctggaattctggggccagggaacagccgtgacagtgtcttccggcggaggtggaagtggtggtggcggtagcggaggcggtgggtccggaggtggtggatctgaacctaagagcagcgacaagacccacacctgtcctccatgtcctgctccagaactgctgggcggaccttccgtgttcctgtttcctccaaagcctaaggacaccctgatgatcagcagaacccctgaagtgacctgcgtggtggtggatgtgtctcacgaggaccctgaagtgaagttcaattggtacgtggacggcgtggaagtgcacaacgccaagaccaagcctagagaggaacagtacaacagcacctacagagtggtgtccgtgctgaccgtgctgcaccaggattggctgaacggcaaagagtacaagtgcaaggtgtccaacaaggccctgcctgcccctgaggaaaagaccatcagcaaggccaagggccagcctagggaaccccaggtttacaccctgcctccatgccgcgaggaaatgaccaagaaccaggtgtccctgtggtgcctcgtgaagggcttctacccttccgatatcgccgtggaatgggagagcaatggccagcctgagaacaactacaagacaacccctcctgtgctggacagcgacggctcattcttcctgtacagcaagctgaccgtggacaagtccagatggcagcagggcaacgtgttcagctgtagcgtgctgcacgaagccctgcacagccactacacccagaagtccctgtctctgagccccggcaagtgataa

SEQ ID NO: 522 - DNA, 1638 bp, synthetic construct; identical to SEQ ID NO: 506
  source 1..1638: mol_type = other DNA

SEQ ID NO: 523 - DNA, 1638 bp, synthetic construct; identical to SEQ ID NO: 507
  source 1..1638: mol_type = other DNA

SEQ ID NO: 524 - DNA, 1638 bp, synthetic construct; identical to SEQ ID NO: 508
  source 1..1638: mol_type = other DNA

SEQ ID NO: 525 - DNA, 1638 bp, synthetic construct; identical to SEQ ID NO: 509
  source 1..1638: mol_type = other DNA

SEQ ID NO: 526 - DNA, 1638 bp, synthetic construct; identical to SEQ ID NO: 510
  source 1..1638: mol_type = other DNA

SEQ ID NO: 527 - DNA, 1638 bp, synthetic construct; identical to SEQ ID NO: 511
  source 1..1638: mol_type = other DNA

SEQ ID NO: 528 - DNA, 1638 bp, synthetic construct; identical to SEQ ID NO: 512
  source 1..1638: mol_type = other DNA

SEQ ID NO: 529 - DNA, 1638 bp, synthetic construct; identical to SEQ ID NO: 513
  source 1..1638: mol_type = other DNA

SEQ ID NO: 530 - DNA, 1638 bp, synthetic construct; identical to SEQ ID NO: 514
  source 1..1638: mol_type = other DNA

SEQ ID NO: 531 - DNA, 1638 bp, synthetic construct; identical to SEQ ID NO: 515
  source 1..1638: mol_type = other DNA

SEQ ID NO: 532 - DNA, 1638 bp, synthetic construct; identical to SEQ ID NO: 516
  source 1..1638: mol_type = other DNA

SEQ ID NO: 533 - DNA, 1638 bp, synthetic construct; identical to SEQ ID NO: 517
  source 1..1638: mol_type = other DNA

SEQ ID NO: 534 - DNA, 1638 bp, synthetic construct; identical to SEQ ID NO: 518
  source 1..1638: mol_type = other DNA

SEQ ID NO: 535 - DNA, 1638 bp, synthetic construct; identical to SEQ ID NO: 519
  source 1..1638: mol_type = other DNA

SEQ ID NO: 536 - DNA, 1638 bp, synthetic construct; identical to SEQ ID NO: 520
  source 1..1638: mol_type = other DNA

SEQ ID NO: 537 - DNA, 1638 bp, synthetic construct; identical to SEQ ID NO: 521
  source 1..1638: mol_type = other DNA

SEQ ID NO: 538 - DNA, 1638 bp, synthetic construct
  source 1..1638: mol_type = other DNA
atggattggatctggcgcatcctgtttctcgtgggagctgccacaggcgcccactctgattttgtgctgacacagtctccccacagcctgagcgttacacctggcgagtctgccagcatcagctgcaagtctagccactctctgatccacggcgaccggaacaactacctggcttggtacgtgcagaagcccggcagatctcctcagctgctgatctacctggccagcagcagagcttctggcgtgcccgatagattttctggcagcggcagcgacaaggacttcaccctgaagatctccagagtggaaaccgaggacgtgggcacctactactgtatgcagggcagagagagcccctggacatttggccagggcaccaaggtggacatcaaaggcggcggaggaagcggaggcggaggttctggtggcggaggctcaggcggtggcggatctcaagttcatctgacacagagcggccctgaagtgcggaagcctggcacaagcgtgaaggtgtcctgtaaagcccctggcaacaccctgaaaacctacgacctgcactgggtccgatctgtgcctggacagggactgcaatggatgggctggattagccacgagggcgacaagaaagtgatcgtggaacggttcaaggccaaagtgaccatcgactgggacagaagcaccaacaccgcctacctgcagctgagcggactgacatctggcgataccgccgtgtactactgtgccaagggcagcaagcaccggctgagagattacgccctgtacgacgatgacggcgccctgaattgggccgtcgatgtggactacctgagcaacctggaattctggggccagggaacagccgtgacagtgtcttccggcggaggtggaagtggtggtggcggtagcggaggcggtgggtccggaggtggtggatctgaacctaagagcagcgacaagacccacacctgtcctccatgtcctgctccagaactgctcggcggaccttccgtgttcctgtttcctccaaagcctaaggacaccctgatgatcagcagaacccctgaagtgacctgcgtggtggtggatgtgtctcacgaggaccccgaagtgaagttcaattggtacgtggacggcgtggaagtgcacaacgccaagaccaagcctagagaggaacagtacaacagcacctacagagtggtgtccgtgctgacagtgctgcaccaggattggctgaacggcaaagagtacaagtgcaaggtgtccaacaaggccctgcctgctcctatcgagaaaaccatcagcaaggccaagggccagcctagggaaccccaggtttacacactgcctccaagccgcgacgaactgaccaagaaccaggtgtccctgacctgcctcgtgaagggcttctacccttccgatatcgccgtggaatgggagagcaatggccagcctgagaacaactacaagacaacccctcctgtgctggacagcgacggctcattcttcctgtacagcaagctgactgtggataagtcccggtggcagcagggcaacgtgttcagctgttctgtgatgcacgaagccctgcacaaccactacacccagaaaagcctgtctctgagccccggcaagtgataa

SEQ ID NO: 539 - DNA, 1638 bp, synthetic construct
  source 1..1638: mol_type = other DNA
atggattggatctggcgcatcctgtttctcgtgggagctgccacaggcgcccactctgattttgtgctgacacagtctccccacagcctgagcgttacacctggcgagtctgccagcatcagctgcaagtctagccactctctgatccacggcgaccggaacaactacctggcttggtacgtgcagaagcccggcagatctcctcagctgctgatctacctggccagcagcagagcttctggcgtgcccgatagattttctggcagcggcagcgacaaggacttcaccctgaagatctccagagtggaaaccgaggacgtgggcacctactactgtatgcagggcagagagagcccctggacatttggccagggcaccaaggtggacatcaaaggcggcggaggaagcggaggcggaggttctggtggcggaggctcaggcggtggcggatctcaagttcatctgacacagagcggccctgaagtgcggaagcctggcacaagcgtgaaggtgtcctgtaaagcccctggcaacaccctgaaaacctacgacctgcactgggtccgatctgtgcctggacagggactgcaatggatgggctggattagccacgagggcgacaagaaagtgatcgtggaacggttcaaggccaaagtgaccatcgactgggacagaagcaccaacaccgcctacctgcagctgagcggactgacatctggcgataccgccgtgtactactgtgccaagggcagcaagcaccggctgagagattacgccctgtacgacgatgacggcgccctgaattgggccgtcgatgtggactacctgagcaacctggaattctggggccagggaacagccgtgacagtgtcttccggcggaggtggaagtggtggtggcggtagcggaggcggtgggtccggaggtggtggatctgaacctaagagcagcgacaagacccacacctgtcctccatgtcctgctccagaactgctcggcggaccttccgtgttcctgtttcctccaaagcctaaggacaccctgatgatcagcagaacccctgaagtgacctgcgtggtggtggatgtgtctcacgaggaccccgaagtgaagttcaattggtacgtggacggcgtggaagtgcacaacgccaagaccaagcctagagaggaacagtacaacagcacctacagagtggtgtccgtgctgacagtgctgcaccaggattggctgaacggcaaagagtacaagtgcaaggtgtccaacaaggccctgcctgctcctatcgagaaaaccatcagcaaggccaagggccagcctagggaaccccaggtttacacactgcctccaagccgcgacgaactgaccaagaaccaggtgtccctgacctgcctcgtgaagggcttctacccttccgatatcgccgtggaatgggagagcaatggccagcctgagaacaactacaagacaacccctcctgtgctggacagcgacggctcattcttcctgtacagcaagctgaccgtggacaagtccagatggcagcagggcaacgtgttcagctgtagcgtgctgcacgaagccctgcacagccactacacccagaaaagcctgtctctgagccccggcaaatgataa

SEQ ID NO: 540 - DNA, 1638 bp, synthetic construct
  source 1..1638: mol_type = other DNA
atggattggatctggcgcatcctgtttctcgtgggagctgccacaggcgcccactctgattttgtgctgacacagtctccccacagcctgagcgttacacctggcgagtctgccagcatcagctgcaagtctagccactctctgatccacggcgaccggaacaactacctggcttggtacgtgcagaagcccggcagatctcctcagctgctgatctacctggccagcagcagagcttctggcgtgcccgatagattttctggcagcggcagcgacaaggacttcaccctgaagatctccagagtggaaaccgaggacgtgggcacctactactgtatgcagggcagagagagcccctggacatttggccagggcaccaaggtggacatcaaaggcggcggaggaagcggaggcggaggttctggtggcggaggctcaggcggtggcggatctcaagttcatctgacacagagcggccctgaagtgcggaagcctggcacaagcgtgaaggtgtcctgtaaagcccctggcaacaccctgaaaacctacgacctgcactgggtccgatctgtgcctggacagggactgcaatggatgggctggattagccacgagggcgacaagaaagtgatcgtggaacggttcaaggccaaagtgaccatcgactgggacagaagcaccaacaccgcctacctgcagctgagcggactgacatctggcgataccgccgtgtactactgtgccaagggcagcaagcaccggctgagagattacgccctgtacgacgatgacggcgccctgaattgggccgtcgatgtggactacctgagcaacctggaattctggggccagggaacagccgtgacagtgtcttccggcggaggtggaagtggtggtggcggtagcggaggcggtgggtccggaggtggtggatctgaacctaagagcagcgacaagacccacacctgtcctccatgtcctgctccagaactgctggccggaccttccgtgttcctgtttcctccaaagcctaaggacaccctgatgatcagcagaacccctgaagtgacctgcgtggtggtggatgtgtctcacgaggaccccgaagtgaagttcaattggtacgtggacggcgtggaagtgcacaatgccaagaccaagcctagagaggaacagtacaacagcacctacagagtggtgtccgtgctgaccgtgctgcaccaggattggctgaacggcaaagagtacaagtgcaaggtgtccaacaaggccctgcctctgcctgaggaaaagaccatcagcaaggccaagggccagcctagggaaccccaggtttacacactgcctccaagccgcgacgaactgaccaagaaccaggtgtccctgacctgcctcgtgaagggcttctacccttccgatatcgccgtggaatgggagagcaatggccagcctgagaacaactacaagacaacccctcctgtgctggacagcgacggctcattcttcctgtacagcaagctgaccgtggacaagtccagatggcagcagggcaacgtgttcagctgtagcgtgctgcacgaagccctgcacagccactacacccagaaaagcctgtctctgagccccggcaaatgataa

SEQ ID NO: 541 - DNA, 1638 bp, synthetic construct
  source 1..1638: mol_type = other DNA
atggattggatctggcgcatcctgtttctcgtgggagctgccacaggcgcccactctgattttgtgctgacacagtctccccacagcctgagcgttacacctggcgagtctgccagcatcagctgcaagtctagccactctctgatccacggcgaccggaacaactacctggcttggtacgtgcagaagcccggcagatctcctcagctgctgatctacctggccagcagcagagcttctggcgtgcccgatagattttctggcagcggcagcgacaaggacttcaccctgaagatctccagagtggaaaccgaggacgtgggcacctactactgtatgcagggcagagagagcccctggacatttggccagggcaccaaggtggacatcaaaggcggcggaggaagcggaggcggaggttctggtggcggaggctcaggcggtggcggatctcaagttcatctgacacagagcggccctgaagtgcggaagcctggcacaagcgtgaaggtgtcctgtaaagcccctggcaacaccctgaaaacctacgacctgcactgggtccgatctgtgcctggacagggactgcaatggatgggctggattagccacgagggcgacaagaaagtgatcgtggaacggttcaaggccaaagtgaccatcgactgggacagaagcaccaacaccgcctacctgcagctgagcggactgacatctggcgataccgccgtgtactactgtgccaagggcagcaagcaccggctgagagattacgccctgtacgacgatgacggcgccctgaattgggccgtcgatgtggactacctgagcaacctggaattctggggccagggaacagccgtgacagtgtcttccggcggaggtggaagtggtggtggcggtagcggaggcggtgggtccggaggtggtggatctgaacctaagagcagcgacaagacccacacctgtcctccatgtcctgctccagaactgctggccggaccttccgtgttcctgtttcctccaaagcctaaggacaccctgatgatcagcagaacccctgaagtgacctgcgtggtggtggatgtgtctcacgaggaccctgaagtgaagttcaattggtacgtggacggcgtggaagtgcacaacgccaagaccaagcctagagaggaacagtacaacagcacctacagagtggtgtccgtgctgaccgtgctgcaccaggattggctgaacggcaaagagtacaagtgcaaggtgtccaacaaggccctgcctgcccctgaggaaaagaccatcagcaaggccaagggccagcctagggaaccccaggtttacacactgcctccaagccgcgacgaactgaccaagaaccaggtgtccctgacctgcctcgtgaagggcttctacccttccgatatcgccgtggaatgggagagcaatggccagcctgagaacaactacaagacaacccctcctgtgctggacagcgacggctcattcttcctgtacagcaagctgaccgtggacaagtccagatggcagcagggcaacgtgttcagctgtagcgtgctgcacgaagccctgcacagccactacacccagaaaagcctgtctctgagccccggcaaatgataa

SEQ ID NO: 542 - DNA, 1638 bp, synthetic construct
  source 1..1638: mol_type = other DNA
atggattggatctggcgcatcctgtttctcgtgggagctgccacaggcgcccactctgattttgtgctgacacagtctccccacagcctgagcgttacacctggcgagtctgccagcatcagctgcaagtctagccactctctgatccacggcgaccggaacaactacctggcttggtacgtgcagaagcccggcagatctcctcagctgctgatctacctggccagcagcagagcttctggcgtgcccgatagattttctggcagcggcagcgacaaggacttcaccctgaagatctccagagtggaaaccgaggacgtgggcacctactactgtatgcagggcagagagagcccctggacatttggccagggcaccaaggtggacatcaaaggcggcggaggaagcggaggcggaggttctggtggcggaggctcaggcggtggcggatctcaagttcatctgacacagagcggccctgaagtgcggaagcctggcacaagcgtgaaggtgtcctgtaaagcccctggcaacaccctgaaaacctacgacctgcactgggtccgatctgtgcctggacagggactgcaatggatgggctggattagccacgagggcgacaagaaagtgatcgtggaacggttcaaggccaaagtgaccatcgactgggacagaagcaccaacaccgcctacctgcagctgagcggactgacatctggcgataccgccgtgtactactgtgccaagggcagcaagcaccggctgagagattacgccctgtacgacgatgacggcgccctgaattgggccgtcgatgtggactacctgagcaacctggaattctggggccagggaacagccgtgacagtgtcttccggcggaggtggaagtggtggtggcggtagcggaggcggtgggtccggaggtggtggatctgaacctaagagcagcgacaagacccacacctgtcctccatgtcctgctccagaactgctggccggaccttccgtgttcctgtttcctccaaagcctaaggacaccctgatgatcagcagaacccctgaagtgacctgcgtggtggtggatgtgtctcacgaggaccctgaagtgaagttcaattggtacgtggacggcgtggaagtgcacaacgccaagaccaagcctagagaggaacagtacaacagcacctacagagtggtgtccgtgctgaccgtgctgcaccaggattggctgaacggcaaagagtacaagtgcaaggtgtccaacaaggccctgcctgcccctatcgaaaagaccatcagcaaggccaagggccagcctagggaaccccaggtttacacactgcctccaagccgcgacgaactgaccaagaaccaggtgtccctgacctgcctcgtgaagggcttctacccttccgatatcgccgtggaatgggagagcaatggccagcctgagaacaactacaagacaacccctcctgtgctggacagcgacggctcattcttcctgtacagcaagctgaccgtggacaagtccagatggcagcagggcaacgtgttcagctgtagcgtgctgcacgaagccctgcacagccactacacccagaaaagcctgtctctgagccccggcaaatgataa

SEQ ID NO: 543 - DNA, 1638 bp, synthetic construct
  source 1..1638: mol_type = other DNA
atggattggatctggcgcatcctgtttctcgtgggagctgccacaggcgcccactctgattttgtgctgacacagtctccccacagcctgagcgttacacctggcgagtctgccagcatcagctgcaagtctagccactctctgatccacggcgaccggaacaactacctggcttggtacgtgcagaagcccggcagatctcctcagctgctgatctacctggccagcagcagagcttctggcgtgcccgatagattttctggcagcggcagcgacaaggacttcaccctgaagatctccagagtggaaaccgaggacgtgggcacctactactgtatgcagggcagagagagcccctggacatttggccagggcaccaaggtggacatcaaaggcggcggaggaagcggaggcggaggttctggtggcggaggctcaggcggtggcggatctcaagttcatctgacacagagcggccctgaagtgcggaagcctggcacaagcgtgaaggtgtcctgtaaagcccctggcaacaccctgaaaacctacgacctgcactgggtccgatctgtgcctggacagggactgcaatggatgggctggattagccacgagggcgacaagaaagtgatcgtggaacggttcaaggccaaagtgaccatcgactgggacagaagcaccaacaccgcctacctgcagctgagcggactgacatctggcgataccgccgtgtactactgtgccaagggcagcaagcaccggctgagagattacgccctgtacgacgatgacggcgccctgaattgggccgtcgatgtggactacctgagcaacctggaattctggggccagggaacagccgtgacagtgtcttccggcggaggtggaagtggtggtggcggtagcggaggcggtgggtccggaggtggtggatctgaacctaagagcagcgacaagacccacacctgtcctccatgtcctgctccagaactgctgggcggaccttccgtgttcctgtttcctccaaagcctaaggacaccctgatgatcagcagaacccctgaagtgacctgcgtggtggtggatgtgtctcacgaggaccctgaagtgaagttcaattggtacgtggacggcgtggaagtgcacaacgccaagaccaagcctagagaggaacagtacaacagcacctacagagtggtgtccgtgctgaccgtgctgcaccaggattggctgaacggcaaagagtacaagtgcaaggtgtccaacaaggccctgcctgcccctgaggaaaagaccatcagcaaggccaagggccagcctagggaaccccaggtttacacactgcctccaagccgcgacgaactgaccaagaaccaggtgtccctgacctgcctcgtgaagggcttctacccttccgatatcgccgtggaatgggagagcaatggccagcctgagaacaactacaagacaacccctcctgtgctggacagcgacggctcattcttcctgtacagcaagctgaccgtggacaagtccagatggcagcagggcaacgtgttcagctgtagcgtgctgcacgaagccctgcacagccactacacccagaaaagcctgtctctgagccccggcaaatgataa

SEQ ID NO: 544 - DNA, 1638 bp, synthetic construct
  source 1..1638: mol_type = other DNA
atggattggatctggcgcatcctgtttctcgtgggagctgccacaggcgcccactctgattttgtgctgacacagtctccccacagcctgagcgttacacctggcgagtctgccagcatcagctgcaagtctagccactctctgatccacggcgaccggaacaactacctggcttggtacgtgcagaagcccggcagatctcctcagctgctgatctacctggccagcagcagagcttctggcgtgcccgatagattttctggcagcggcagcgacaaggacttcaccctgaagatctccagagtggaaaccgaggacgtgggcacctactactgtatgcagggcagagagagcccctggacatttggccagggcaccaaggtggacatcaaaggcggcggaggaagcggaggcggaggttctggtggcggaggctcaggcggtggcggatctcaagttcatctgacacagagcggccctgaagtgcggaagcctggcacaagcgtgaaggtgtcctgtaaagcccctggcaacaccctgaaaacctacgacctgcactgggtccgatctgtgcctggacagggactgcaatggatgggctggattagccacgagggcgacaagaaagtgatcgtggaacggttcaaggccaaagtgaccatcgactgggacagaagcaccaacaccgcctacctgcagctgagcggactgacatctggcgataccgccgtgtactactgtgccaagggcagcaagcaccggctgagagattacgccctgtacgacgatgacggcgccctgaattgggccgtcgatgtggactacctgagcaacctggaattctggggccagggaacagccgtgacagtgtcttccggcggaggtggaagtggtggtggcggtagcggaggcggtgggtccggaggtggtggatctgaacctaagagcagcgacaagacccacacctgtcctccatgtcctgctccagaactgctcggcggaccttccgtgttcctgtttcctccaaagcctaaggacaccctgatgatcagcagaacccctgaagtgacctgcgtggtggtggatgtgtctcacgaggaccccgaagtgaagttcaattggtacgtggacggcgtggaagtgcacaacgccaagaccaagcctagagaggaacagtacaacagcacctacagagtggtgtccgtgctgacagtgctgcaccaggattggctgaacggcaaagagtacaagtgcaaggtgtccaacaaggccctgcctgctcctatcgagaaaaccatcagcaaggccaagggccagcctcgcgaacctcaagtctgtacactgcctcctagccgcgacgaactgaccaagaaccaggtgtccctgagctgcgccgtgaagggcttttacccttccgatatcgccgtggaatgggagagcaatggccagcctgagaacaactacaagacaacccctcctgtgctggacagcgacggctcattcttcctggtgtccaagctgacagtggacaagagcagatggcagcagggcaacgtgttcagctgcagcgtgctgcatgaagccctgcacagccactacacccagaagtccctgtctctgagccccggcaagtgataa

SEQ ID NO: 545 - DNA, 1638 bp, synthetic construct
  source 1..1638: mol_type = other DNA
atggattggatctggcgcatcctgtttctcgtgggagctgccacaggcgcccactctgattttgtgctgacacagtctccccacagcctgagcgttacacctggcgagtctgccagcatcagctgcaagtctagccactctctgatccacggcgaccggaacaactacctggcttggtacgtgcagaagcccggcagatctcctcagctgctgatctacctggccagcagcagagcttctggcgtgcccgatagattttctggcagcggcagcgacaaggacttcaccctgaagatctccagagtggaaaccgaggacgtgggcacctactactgtatgcagggcagagagagcccctggacatttggccagggcaccaaggtggacatcaaaggcggcggaggaagcggaggcggaggttctggtggcggaggctcaggcggtggcggatctcaagttcatctgacacagagcggccctgaagtgcggaagcctggcacaagcgtgaaggtgtcctgtaaagcccctggcaacaccctgaaaacctacgacctgcactgggtccgatctgtgcctggacagggactgcaatggatgggctggattagccacgagggcgacaagaaagtgatcgtggaacggttcaaggccaaagtgaccatcgactgggacagaagcaccaacaccgcctacctgcagctgagcggactgacatctggcgataccgccgtgtactactgtgccaagggcagcaagcaccggctgagagattacgccctgtacgacgatgacggcgccctgaattgggccgtcgatgtggactacctgagcaacctggaattctggggccagggaacagccgtgacagtgtcttccggcggaggtggaagtggtggtggcggtagcggaggcggtgggtccggaggtggtggatctgaacctaagagcagcgacaagacccacacctgtcctccatgtcctgctccagaactgctggccggaccttccgtgttcctgtttcctccaaagcctaaggacaccctgatgatcagcagaacccctgaagtgacctgcgtggtggtggatgtgtctcacgaggaccccgaagtgaagttcaattggtacgtggacggcgtggaagtgcacaatgccaagaccaagcctagagaggaacagtacaacagcacctacagagtggtgtccgtgctgaccgtgctgcaccaggattggctgaacggcaaagagtacaagtgcaaggtgtccaacaaggccctgcctctgcctgaggaaaagaccatcagcaaggccaagggccagcctcgcgaacctcaagtctgtacactgcctcctagccgcgacgaactgaccaagaaccaggtgtccctgagctgcgccgtgaagggcttttacccttccgatatcgccgtggaatgggagagcaatggccagcctgagaacaactacaagacaacccctcctgtgctggacagcgacggctcattcttcctggtgtccaagctgacagtggacaagagcagatggcagcagggcaacgtgttcagctgcagcgtgctgcatgaagccctgcacagccactacacccagaagtccctgtctctgagccccggcaagtgataa

SEQ ID NO: 546 - DNA, 1638 bp, synthetic construct
  source 1..1638: mol_type = other DNA
atggattggatctggcgcatcctgtttctcgtgggagctgccacaggcgcccactctgattttgtgctgacacagtctccccacagcctgagcgttacacctggcgagtctgccagcatcagctgcaagtctagccactctctgatccacggcgaccggaacaactacctggcttggtacgtgcagaagcccggcagatctcctcagctgctgatctacctggccagcagcagagcttctggcgtgcccgatagattttctggcagcggcagcgacaaggacttcaccctgaagatctccagagtggaaaccgaggacgtgggcacctactactgtatgcagggcagagagagcccctggacatttggccagggcaccaaggtggacatcaaaggcggcggaggaagcggaggcggaggttctggtggcggaggctcaggcggtggcggatctcaagttcatctgacacagagcggccctgaagtgcggaagcctggcacaagcgtgaaggtgtcctgtaaagcccctggcaacaccctgaaaacctacgacctgcactgggtccgatctgtgcctggacagggactgcaatggatgggctggattagccacgagggcgacaagaaagtgatcgtggaacggttcaaggccaaagtgaccatcgactgggacagaagcaccaacaccgcctacctgcagctgagcggactgacatctggcgataccgccgtgtactactgtgccaagggcagcaagcaccggctgagagattacgccctgtacgacgatgacggcgccctgaattgggccgtcgatgtggactacctgagcaacctggaattctggggccagggaacagccgtgacagtgtcttccggcggaggtggaagtggtggtggcggtagcggaggcggtgggtccggaggtggtggatctgaacctaagagcagcgacaagacccacacctgtcctccatgtcctgctccagaactgctggccggaccttccgtgttcctgtttcctccaaagcctaaggacaccctgatgatcagcagaacccctgaagtgacctgcgtggtggtggatgtgtctcacgaggaccctgaagtgaagttcaattggtacgtggacggcgtggaagtgcacaacgccaagaccaagcctagagaggaacagtacaacagcacctacagagtggtgtccgtgctgaccgtgctgcaccaggattggctgaacggcaaagagtacaagtgcaaggtgtccaacaaggccctgcctgcccctgaggaaaagaccatcagcaaggccaagggccagcctcgcgaacctcaagtctgtacactgcctcctagccgcgacgaactgaccaagaaccaggtgtccctgagctgcgccgtgaagggcttttacccttccgatatcgccgtggaatgggagagcaatggccagcctgagaacaactacaagacaacccctcctgtgctggacagcgacggctcattcttcctggtgtccaagctgacagtggacaagagcagatggcagcagggcaacgtgttcagctgcagcgtgctgcatgaagccctgcacagccactacacccagaagtccctgtctctgagccccggcaagtgataa

SEQ ID NO: 547 - DNA, 1638 bp, synthetic construct
  source 1..1638: mol_type = other DNA
atggattggatctggcgcatcctgtttctcgtgggagctgccacaggcgcccactctgattttgtgctgacacagtctccccacagcctgagcgttacacctggcgagtctgccagcatcagctgcaagtctagccactctctgatccacggcgaccggaacaactacctggcttggtacgtgcagaagcccggcagatctcctcagctgctgatctacctggccagcagcagagcttctggcgtgcccgatagattttctggcagcggcagcgacaaggacttcaccctgaagatctccagagtggaaaccgaggacgtgggcacctactactgtatgcagggcagagagagcccctggacatttggccagggcaccaaggtggacatcaaaggcggcggaggaagcggaggcggaggttctggtggcggaggctcaggcggtggcggatctcaagttcatctgacacagagcggccctgaagtgcggaagcctggcacaagcgtgaaggtgtcctgtaaagcccctggcaacaccctgaaaacctacgacctgcactgggtccgatctgtgcctggacagggactgcaatggatgggctggattagccacgagggcgacaagaaagtgatcgtggaacggttcaaggccaaagtgaccatcgactgggacagaagcaccaacaccgcctacctgcagctgagcggactgacatctggcgataccgccgtgtactactgtgccaagggcagcaagcaccggctgagagattacgccctgtacgacgatgacggcgccctgaattgggccgtcgatgtggactacctgagcaacctggaattctggggccagggaacagccgtgacagtgtcttccggcggaggtggaagtggtggtggcggtagcggaggcggtgggtccggaggtggtggatctgaacctaagagcagcgacaagacccacacctgtcctccatgtcctgctccagaactgctggccggaccttccgtgttcctgtttcctccaaagcctaaggacaccctgatgatcagcagaacccctgaagtgacctgcgtggtggtggatgtgtctcacgaggaccctgaagtgaagttcaattggtacgtggacggcgtggaagtgcacaacgccaagaccaagcctagagaggaacagtacaacagcacctacagagtggtgtccgtgctgaccgtgctgcaccaggattggctgaacggcaaagagtacaagtgcaaggtgtccaacaaggccctgcctgcccctatcgaaaagaccatcagcaaggccaagggccagcctcgcgaacctcaagtctgtacactgcctcctagccgcgacgaactgaccaagaaccaggtgtccctgagctgcgccgtgaagggcttttacccttccgatatcgccgtggaatgggagagcaatggccagcctgagaacaactacaagacaacccctcctgtgctggacagcgacggctcattcttcctggtgtccaagctgacagtggacaagagcagatggcagcagggcaacgtgttcagctgcagcgtgctgcatgaagccctgcacagccactacacccagaagtccctgtctctgagccccggcaagtgataa

SEQ ID NO: 548 - DNA, 1638 bp, synthetic construct
  source 1..1638: mol_type = other DNA
atggattggatctggcgcatcctgtttctcgtgggagctgccacaggcgcccactctgattttgtgctgacacagtctccccacagcctgagcgttacacctggcgagtctgccagcatcagctgcaagtctagccactctctgatccacggcgaccggaacaactacctggcttggtacgtgcagaagcccggcagatctcctcagctgctgatctacctggccagcagcagagcttctggcgtgcccgatagattttctggcagcggcagcgacaaggacttcaccctgaagatctccagagtggaaaccgaggacgtgggcacctactactgtatgcagggcagagagagcccctggacatttggccagggcaccaaggtggacatcaaaggcggcggaggaagcggaggcggaggttctggtggcggaggctcaggcggtggcggatctcaagttcatctgacacagagcggccctgaagtgcggaagcctggcacaagcgtgaaggtgtcctgtaaagcccctggcaacaccctgaaaacctacgacctgcactgggtccgatctgtgcctggacagggactgcaatggatgggctggattagccacgagggcgacaagaaagtgatcgtggaacggttcaaggccaaagtgaccatcgactgggacagaagcaccaacaccgcctacctgcagctgagcggactgacatctggcgataccgccgtgtactactgtgccaagggcagcaagcaccggctgagagattacgccctgtacgacgatgacggcgccctgaattgggccgtcgatgtggactacctgagcaacctggaattctggggccagggaacagccgtgacagtgtcttccggcggaggtggaagtggtggtggcggtagcggaggcggtgggtccggaggtggtggatctgaacctaagagcagcgacaagacccacacctgtcctccatgtcctgctccagaactgctgggcggaccttccgtgttcctgtttcctccaaagcctaaggacaccctgatgatcagcagaacccctgaagtgacctgcgtggtggtggatgtgtctcacgaggaccctgaagtgaagttcaattggtacgtggacggcgtggaagtgcacaacgccaagaccaagcctagagaggaacagtacaacagcacctacagagtggtgtccgtgctgaccgtgctgcaccaggattggctgaacggcaaagagtacaagtgcaaggtgtccaacaaggccctgcctgcccctgaggaaaagaccatcagcaaggccaagggccagcctcgcgaacctcaagtctgtacactgcctcctagccgcgacgaactgaccaagaaccaggtgtccctgagctgcgccgtgaagggcttttacccttccgatatcgccgtggaatgggagagcaatggccagcctgagaacaactacaagacaacccctcctgtgctggacagcgacggctcattcttcctggtgtccaagctgacagtggacaagagcagatggcagcagggcaacgtgttcagctgcagcgtgctgcatgaagccctgcacagccactacacccagaagtccctgtctctgagccccggcaagtgataa

SEQ ID NO: 549 - DNA, 1638 bp, synthetic construct
  source 1..1638: mol_type = other DNA
atggattggatctggcgcatcctgtttctcgtgggagctgccacaggcgcccactctgattttgtgctgacacagtctccccacagcctgagcgttacacctggcgagtctgccagcatcagctgcaagtctagccactctctgatccacggcgaccggaacaactacctggcttggtacgtgcagaagcccggcagatctcctcagctgctgatctacctggccagcagcagagcttctggcgtgcccgatagattttctggcagcggcagcgacaaggacttcaccctgaagatctccagagtggaaaccgaggacgtgggcacctactactgtatgcagggcagagagagcccctggacatttggccagggcaccaaggtggacatcaaaggcggcggaggaagcggaggcggaggttctggtggcggaggctcaggcggtggcggatctcaagttcatctgacacagagcggccctgaagtgcggaagcctggcacaagcgtgaaggtgtcctgtaaagcccctggcaacaccctgaaaacctacgacctgcactgggtccgatctgtgcctggacagggactgcaatggatgggctggattagccacgagggcgacaagaaagtgatcgtggaacggttcaaggccaaagtgaccatcgactgggacagaagcaccaacaccgcctacctgcagctgagcggactgacatctggcgataccgccgtgtactactgtgccaagggcagcaagcaccggctgagagattacgccctgtacgacgatgacggcgccctgaattgggccgtcgatgtggactacctgagcaacctggaattctggggccagggaacagccgtgacagtgtcttccggcggaggtggaagtggtggtggcggtagcggaggcggtgggtccggaggtggtggatctgaacctaagagcagcgacaagacccacacctgtcctccatgtcctgctccagaactgctcggcggaccttccgtgttcctgtttcctccaaagcctaaggacaccctgatgatcagcagaacccctgaagtgacctgcgtggtggtggatgtgtctcacgaggaccccgaagtgaagttcaattggtacgtggacggcgtggaagtgcacaacgccaagaccaagcctagagaggaacagtacaacagcacctacagagtggtgtccgtgctgacagtgctgcaccaggattggctgaacggcaaagagtacaagtgcaaggtgtccaacaaggccctgcctgctcctatcgagaaaaccatcagcaaggccaagggccagcctagggaaccccaggtttacaccctgcctccatgccgcgacgaactgaccaagaaccaggtgtccctgtggtgcctggtcaagggcttctacccttccgatatcgccgtggaatgggagagcaatggccagcctgagaacaactacaagacaacccctcctgtgctggacagcgacggctcattcttcctgtacagcaagctgacagtggacaagagcagatggcagcagggcaacgtgttcagctgcagcgtgctgcatgaagccctgcacagccactacacccagaagtccctgtctctgagccccggcaagtgataa

SEQ ID NO: 550 - DNA, 1638 bp, synthetic construct
  source 1..1638: mol_type = other DNA
atggattggatctggcgcatcctgtttctcgtgggagctgccacaggcgcccactctgattttgtgctgacacagtctccccacagcctgagcgttacacctggcgagtctgccagcatcagctgcaagtctagccactctctgatccacggcgaccggaacaactacctggcttggtacgtgcagaagcccggcagatctcctcagctgctgatctacctggccagcagcagagcttctggcgtgcccgatagattttctggcagcggcagcgacaaggacttcaccctgaagatctccagagtggaaaccgaggacgtgggcacctactactgtatgcagggcagagagagcccctggacatttggccagggcaccaaggtggacatcaaaggcggcggaggaagcggaggcggaggttctggtggcggaggctcaggcggtggcggatctcaagttcatctgacacagagcggccctgaagtgcggaagcctggcacaagcgtgaaggtgtcctgtaaagcccctggcaacaccctgaaaacctacgacctgcactgggtccgatctgtgcctggacagggactgcaatggatgggctggattagccacgagggcgacaagaaagtgatcgtggaacggttcaaggccaaagtgaccatcgactgggacagaagcaccaacaccgcctacctgcagctgagcggactgacatctggcgataccgccgtgtactactgtgccaagggcagcaagcaccggctgagagattacgccctgtacgacgatgacggcgccctgaattgggccgtcgatgtggactacctgagcaacctggaattctggggccagggaacagccgtgacagtgtcttccggcggaggtggaagtggtggtggcggtagcggaggcggtgggtccggaggtggtggatctgaacctaagagcagcgacaagacccacacctgtcctccatgtcctgctccagaactgctggccggaccttccgtgttcctgtttcctccaaagcctaaggacaccctgatgatcagcagaacccctgaagtgacctgcgtggtggtggatgtgtctcacgaggaccccgaagtgaagttcaattggtacgtggacggcgtggaagtgcacaatgccaagaccaagcctagagaggaacagtacaacagcacctacagagtggtgtccgtgctgaccgtgctgcaccaggattggctgaacggcaaagagtacaagtgcaaggtgtccaacaaggccctgcctctgcctgaggaaaagaccatcagcaaggccaagggccagcctagggaaccccaggtttacaccctgcctccatgccgcgacgaactgaccaagaaccaggtgtccctgtggtgcctggtcaagggcttctacccttccgatatcgccgtggaatgggagagcaatggccagcctgagaacaactacaagacaacccctcctgtgctggacagcgacggctcattcttcctgtacagcaagctgacagtggacaagagcagatggcagcagggcaacgtgttcagctgcagcgtgctgcatgaagccctgcacagccactacacccagaagtccctgtctctgagccccggcaagtgataa

SEQ ID NO: 551 - DNA, 1638 bp, synthetic construct
  source 1..1638: mol_type = other DNA
atggattggatctggcgcatcctgtttctcgtgggagctgccacaggcgcccactctgattttgtgctgacacagtctccccacagcctgagcgttacacctggcgagtctgccagcatcagctgcaagtctagccactctctgatccacggcgaccggaacaactacctggcttggtacgtgcagaagcccggcagatctcctcagctgctgatctacctggccagcagcagagcttctggcgtgcccgatagattttctggcagcggcagcgacaaggacttcaccctgaagatctccagagtggaaaccgaggacgtgggcacctactactgtatgcagggcagagagagcccctggacatttggccagggcaccaaggtggacatcaaaggcggcggaggaagcggaggcggaggttctggtggcggaggctcaggcggtggcggatctcaagttcatctgacacagagcggccctgaagtgcggaagcctggcacaagcgtgaaggtgtcctgtaaagcccctggcaacaccctgaaaacctacgacctgcactgggtccgatctgtgcctggacagggactgcaatggatgggctggattagccacgagggcgacaagaaagtgatcgtggaacggttcaaggccaaagtgaccatcgactgggacagaagcaccaacaccgcctacctgcagctgagcggactgacatctggcgataccgccgtgtactactgtgccaagggcagcaagcaccggctgagagattacgccctgtacgacgatgacggcgccctgaattgggccgtcgatgtggactacctgagcaacctggaattctggggccagggaacagccgtgacagtgtcttccggcggaggtggaagtggtggtggcggtagcggaggcggtgggtccggaggtggtggatctgaacctaagagcagcgacaagacccacacctgtcctccatgtcctgctccagaactgctggccggaccttccgtgttcctgtttcctccaaagcctaaggacaccctgatgatcagcagaacccctgaagtgacctgcgtggtggtggatgtgtctcacgaggaccctgaagtgaagttcaattggtacgtggacggcgtggaagtgcacaacgccaagaccaagcctagagaggaacagtacaacagcacctacagagtggtgtccgtgctgaccgtgctgcaccaggattggctgaacggcaaagagtacaagtgcaaggtgtccaacaaggccctgcctgcccctgaggaaaagaccatcagcaaggccaagggccagcctagggaaccccaggtttacaccctgcctccatgccgcgacgaactgaccaagaaccaggtgtccctgtggtgcctggtcaagggcttctacccttccgatatcgccgtggaatgggagagcaatggccagcctgagaacaactacaagacaacccctcctgtgctggacagcgacggctcattcttcctgtacagcaagctgacagtggacaagagcagatggcagcagggcaacgtgttcagctgcagcgtgctgcatgaagccctgcacagccactacacccagaagtccctgtctctgagccccggcaagtgataa

SEQ ID NO: 552 - DNA, 1638 bp, synthetic construct
  source 1..1638: mol_type = other DNA
atggattggatctggcgcatcctgtttctcgtgggagctgccacaggcgcccactctgattttgtgctgacacagtctccccacagcctgagcgttacacctggcgagtctgccagcatcagctgcaagtctagccactctctgatccacggcgaccggaacaactacctggcttggtacgtgcagaagcccggcagatctcctcagctgctgatctacctggccagcagcagagcttctggcgtgcccgatagattttctggcagcggcagcgacaaggacttcaccctgaagatctccagagtggaaaccgaggacgtgggcacctactactgtatgcagggcagagagagcccctggacatttggccagggcaccaaggtggacatcaaaggcggcggaggaagcggaggcggaggttctggtggcggaggctcaggcggtggcggatctcaagttcatctgacacagagcggccctgaagtgcggaagcctggcacaagcgtgaaggtgtcctgtaaagcccctggcaacaccctgaaaacctacgacctgcactgggtccgatctgtgcctggacagggactgcaatggatgggctggattagccacgagggcgacaagaaagtgatcgtggaacggttcaaggccaaagtgaccatcgactgggacagaagcaccaacaccgcctacctgcagctgagcggactgacatctggcgataccgccgtgtactactgtgccaagggcagcaagcaccggctgagagattacgccctgtacgacgatgacggcgccctgaattgggccgtcgatgtggactacctgagcaacctggaattctggggccagggaacagccgtgacagtgtcttccggcggaggtggaagtggtggtggcggtagcggaggcggtgggtccggaggtggtggatctgaacctaagagcagcgacaagacccacacctgtcctccatgtcctgctccagaactgctggccggaccttccgtgttcctgtttcctccaaagcctaaggacaccctgatgatcagcagaacccctgaagtgacctgcgtggtggtggatgtgtctcacgaggaccctgaagtgaagttcaattggtacgtggacggcgtggaagtgcacaacgccaagaccaagcctagagaggaacagtacaacagcacctacagagtggtgtccgtgctgaccgtgctgcaccaggattggctgaacggcaaagagtacaagtgcaaggtgtccaacaaggccctgcctgcccctatcgaaaagaccatcagcaaggccaagggccagcctagggaaccccaggtttacaccctgcctccatgccgcgacgaactgaccaagaaccaggtgtccctgtggtgcctggtcaagggcttctacccttccgatatcgccgtggaatgggagagcaatggccagcctgagaacaactacaagacaacccctcctgtgctggacagcgacggctcattcttcctgtacagcaagctgacagtggacaagagcagatggcagcagggcaacgtgttcagctgcagcgtgctgcatgaagccctgcacagccactacacccagaagtccctgtctctgagccccggcaagtgataa

SEQ ID NO: 553 - DNA, 1638 bp, synthetic construct
  source 1..1638: mol_type = other DNA
atggattggatctggcgcatcctgtttctcgtgggagctgccacaggcgcccactctgattttgtgctgacacagtctccccacagcctgagcgttacacctggcgagtctgccagcatcagctgcaagtctagccactctctgatccacggcgaccggaacaactacctggcttggtacgtgcagaagcccggcagatctcctcagctgctgatctacctggccagcagcagagcttctggcgtgcccgatagattttctggcagcggcagcgacaaggacttcaccctgaagatctccagagtggaaaccgaggacgtgggcacctactactgtatgcagggcagagagagcccctggacatttggccagggcaccaaggtggacatcaaaggcggcggaggaagcggaggcggaggttctggtggcggaggctcaggcggtggcggatctcaagttcatctgacacagagcggccctgaagtgcggaagcctggcacaagcgtgaaggtgtcctgtaaagcccctggcaacaccctgaaaacctacgacctgcactgggtccgatctgtgcctggacagggactgcaatggatgggctggattagccacgagggcgacaagaaagtgatcgtggaacggttcaaggccaaagtgaccatcgactgggacagaagcaccaacaccgcctacctgcagctgagcggactgacatctggcgataccgccgtgtactactgtgccaagggcagcaagcaccggctgagagattacgccctgtacgacgatgacggcgccctgaattgggccgtcgatgtggactacctgagcaacctggaattctggggccagggaacagccgtgacagtgtcttccggcggaggtggaagtggtggtggcggtagcggaggcggtgggtccggaggtggtggatctgaacctaagagcagcgacaagacccacacctgtcctccatgtcctgctccagaactgctgggcggaccttccgtgttcctgtttcctccaaagcctaaggacaccctgatgatcagcagaacccctgaagtgacctgcgtggtggtggatgtgtctcacgaggaccctgaagtgaagttcaattggtacgtggacggcgtggaagtgcacaacgccaagaccaagcctagagaggaacagtacaacagcacctacagagtggtgtccgtgctgaccgtgctgcaccaggattggctgaacggcaaagagtacaagtgcaaggtgtccaacaaggccctgcctgcccctgaggaaaagaccatcagcaaggccaagggccagcctagggaaccccaggtttacaccctgcctccatgccgcgacgaactgaccaagaaccaggtgtccctgtggtgcctggtcaagggcttctacccttccgatatcgccgtggaatgggagagcaatggccagcctgagaacaactacaagacaacccctcctgtgctggacagcgacggctcattcttcctgtacagcaagctgacagtggacaagagcagatggcagcagggcaacgtgttcagctgcagcgtgctgcatgaagccctgcacagccactacacccagaagtccctgtctctgagccccggcaagtgataa

SEQ ID NO: 554 - DNA, 1653 bp, synthetic construct
  source 1..1653: mol_type = other DNA
atggattggatctggcgcatcctgtttctcgtgggagctgccacaggcgcccactctcaagttcacctgacacagtctggccccgaagtgcggaagcctggcacaagcgtgaaggtgtcctgtaaagcccctggcaacaccctgaaaacctacgacctgcactgggtccgatctgtgcctggacaaggactgcagtggatgggctggattagccacgagggcgacaagaaagtgatcgtggaacggttcaaggccaaagtgaccatcgactgggacagaagcaccaacaccgcctacctgcagctgagcggactgacatctggcgataccgccgtgtactactgtgccaagggcagcaagcaccggctgagagattacgccctgtacgacgatgacggcgccctgaattgggccgtcgatgtggactacctgagcaacctggaattctggggccagggaacagccgtgacagtgtcttccggcggcggaggaagcggagggggaggctctggaggtggtggctctggtggcggaggctcaggcggtggcggatctgattttgtgctgacacagagccctcacagcctgagcgttacacctggcgagagcgccagcatcagctgcaagtctagccactctctgatccacggcgaccggaacaactacctggcttggtacgtgcagaagcccggcagatctcctcagctgctgatctacctggccagcagcagagctagcggcgtgccagatagattttctggcagcggcagcgacaaggatttcaccctgaagatctccagagtggaaaccgaggacgtgggcacctactactgtatgcagggcagagagagcccctggacatttggccagggcaccaaggtggacatcaaaggcggaggtggaagtggtggtggcggtagcggaggcggtgggtccggaggtggtggatctgaacctaagagcagcgacaagacccacacctgtcctccatgtcctgctccagaactgctcggcggaccttccgtgttcctgtttcctccaaagcctaaggacaccctgatgatcagcagaacccctgaagtgacctgcgtggtggtggatgtgtctcacgaggaccccgaagtgaagttcaattggtacgtggacggcgtggaagtgcacaacgccaagaccaagcctagagaggaacagtacaacagcacctacagagtggtgtccgtgctgacagtgctgcaccaggattggctgaacggcaaagagtacaagtgcaaggtgtccaacaaggccctgcctgctcctatcgagaaaaccatcagcaaggccaagggccagcctagggaaccccaggtttacacactgcctccaagccgcgaggaaatgaccaagaaccaggtgtccctgacctgcctcgtgaagggcttctacccttccgatatcgccgtggaatgggagagcaatggccagcctgagaacaactacaagacaacccctcctgtgctggacagcgacggctcattcttcctgtacagcaagctgactgtggataagtcccggtggcagcagggcaacgtgttcagctgttctgtgatgcacgaagccctgcacaaccactacacccagaaaagcctgtctctgagccccggcaagtgataa

SEQ ID NO: 555 - DNA, 1653 bp, synthetic construct
  source 1..1653: mol_type = other DNA
atggattggatctggcgcatcctgtttctcgtgggagctgccacaggcgcccactctcaagttcacctgacacagtctggccccgaagtgcggaagcctggcacaagcgtgaaggtgtcctgtaaagcccctggcaacaccctgaaaacctacgacctgcactgggtccgatctgtgcctggacaaggactgcagtggatgggctggattagccacgagggcgacaagaaagtgatcgtggaacggttcaaggccaaagtgaccatcgactgggacagaagcaccaacaccgcctacctgcagctgagcggactgacatctggcgataccgccgtgtactactgtgccaagggcagcaagcaccggctgagagattacgccctgtacgacgatgacggcgccctgaattgggccgtcgatgtggactacctgagcaacctggaattctggggccagggaacagccgtgacagtgtcttccggcggcggaggaagcggagggggaggctctggaggtggtggctctggtggcggaggctcaggcggtggcggatctgattttgtgctgacacagagccctcacagcctgagcgttacacctggcgagagcgccagcatcagctgcaagtctagccactctctgatccacggcgaccggaacaactacctggcttggtacgtgcagaagcccggcagatctcctcagctgctgatctacctggccagcagcagagctagcggcgtgccagatagattttctggcagcggcagcgacaaggatttcaccctgaagatctccagagtggaaaccgaggacgtgggcacctactactgtatgcagggcagagagagcccctggacatttggccagggcaccaaggtggacatcaaaggcggaggtggaagtggtggtggcggtagcggaggcggtgggtccggaggtggtggatctgaacctaagagcagcgacaagacccacacctgtcctccatgtcctgctccagaactgctcggcggaccttccgtgttcctgtttcctccaaagcctaaggacaccctgatgatcagcagaacccctgaagtgacctgcgtggtggtggatgtgtctcacgaggaccccgaagtgaagttcaattggtacgtggacggcgtggaagtgcacaacgccaagaccaagcctagagaggaacagtacaacagcacctacagagtggtgtccgtgctgacagtgctgcaccaggattggctgaacggcaaagagtacaagtgcaaggtgtccaacaaggccctgcctgctcctatcgagaaaaccatcagcaaggccaagggccagcctagggaaccccaggtttacacactgcctccaagccgcgaggaaatgaccaagaaccaggtgtccctgacctgcctcgtgaagggcttctacccttccgatatcgccgtggaatgggagagcaatggccagcctgagaacaactacaagacaacccctcctgtgctggacagcgacggctcattcttcctgtacagcaagctgaccgtggacaagtccagatggcagcagggcaacgtgttcagctgtagcgtgctgcacgaagccctgcacagccactacacccagaaaagcctgtctctgagccccggcaaatgataa

SEQ ID NO: 556 - DNA, 1653 bp, synthetic construct
  source 1..1653: mol_type = other DNA
atggattggatctggcgcatcctgtttctcgtgggagctgccacaggcgcccactctcaagttcacctgacacagtctggccccgaagtgcggaagcctggcacaagcgtgaaggtgtcctgtaaagcccctggcaacaccctgaaaacctacgacctgcactgggtccgatctgtgcctggacaaggactgcagtggatgggctggattagccacgagggcgacaagaaagtgatcgtggaacggttcaaggccaaagtgaccatcgactgggacagaagcaccaacaccgcctacctgcagctgagcggactgacatctggcgataccgccgtgtactactgtgccaagggcagcaagcaccggctgagagattacgccctgtacgacgatgacggcgccctgaattgggccgtcgatgtggactacctgagcaacctggaattctggggccagggaacagccgtgacagtgtcttccggcggcggaggaagcggagggggaggctctggaggtggtggctctggtggcggaggctcaggcggtggcggatctgattttgtgctgacacagagccctcacagcctgagcgttacacctggcgagagcgccagcatcagctgcaagtctagccactctctgatccacggcgaccggaacaactacctggcttggtacgtgcagaagcccggcagatctcctcagctgctgatctacctggccagcagcagagctagcggcgtgccagatagattttctggcagcggcagcgacaaggatttcaccctgaagatctccagagtggaaaccgaggacgtgggcacctactactgtatgcagggcagagagagcccctggacatttggccagggcaccaaggtggacatcaaaggcggaggtggaagtggtggtggcggtagcggaggcggtgggtccggaggtggtggatctgaacctaagagcagcgacaagacccacacctgtcctccatgtcctgctccagaactgctggccggaccttccgtgttcctgtttcctccaaagcctaaggacaccctgatgatcagcagaacccctgaagtgacctgcgtggtggtggatgtgtctcacgaggaccccgaagtgaagttcaattggtacgtggacggcgtggaagtgcacaatgccaagaccaagcctagagaggaacagtacaacagcacctacagagtggtgtccgtgctgaccgtgctgcaccaggattggctgaacggcaaagagtacaagtgcaaggtgtccaacaaggccctgcctctgcctgaggaaaagaccatcagcaaggccaagggccagcctagggaaccccaggtttacacactgcctccaagccgcgaggaaatgaccaagaaccaggtgtccctgacctgcctcgtgaagggcttctacccttccgatatcgccgtggaatgggagagcaatggccagcctgagaacaactacaagacaacccctcctgtgctggacagcgacggctcattcttcctgtacagcaagctgaccgtggacaagtccagatggcagcagggcaacgtgttcagctgtagcgtgctgcacgaagccctgcacagccactacacccagaaaagcctgtctctgagccccggcaaatgataa

SEQ ID NO: 557 - DNA, 1653 bp, synthetic construct
  source 1..1653: mol_type = other DNA
atggattggatctggcgcatcctgtttctcgtgggagctgccacaggcgcccactctcaagttcacctgacacagtctggccccgaagtgcggaagcctggcacaagcgtgaaggtgtcctgtaaagcccctggcaacaccctgaaaacctacgacctgcactgggtccgatctgtgcctggacaaggactgcagtggatgggctggattagccacgagggcgacaagaaagtgatcgtggaacggttcaaggccaaagtgaccatcgactgggacagaagcaccaacaccgcctacctgcagctgagcggactgacatctggcgataccgccgtgtactactgtgccaagggcagcaagcaccggctgagagattacgccctgtacgacgatgacggcgccctgaattgggccgtcgatgtggactacctgagcaacctggaattctggggccagggaacagccgtgacagtgtcttccggcggcggaggaagcggagggggaggctctggaggtggtggctctggtggcggaggctcaggcggtggcggatctgattttgtgctgacacagagccctcacagcctgagcgttacacctggcgagagcgccagcatcagctgcaagtctagccactctctgatccacggcgaccggaacaactacctggcttggtacgtgcagaagcccggcagatctcctcagctgctgatctacctggccagcagcagagctagcggcgtgccagatagattttctggcagcggcagcgacaaggatttcaccctgaagatctccagagtggaaaccgaggacgtgggcacctactactgtatgcagggcagagagagcccctggacatttggccagggcaccaaggtggacatcaaaggcggaggtggaagtggtggtggcggtagcggaggcggtgggtccggaggtggtggatctgaacctaagagcagcgacaagacccacacctgtcctccatgtcctgctccagaactgctggccggaccttccgtgttcctgtttcctccaaagcctaaggacaccctgatgatcagcagaacccctgaagtgacctgcgtggtggtggatgtgtctcacgaggaccctgaagtgaagttcaattggtacgtggacggcgtggaagtgcacaacgccaagaccaagcctagagaggaacagtacaacagcacctacagagtggtgtccgtgctgaccgtgctgcaccaggattggctgaacggcaaagagtacaagtgcaaggtgtccaacaaggccctgcctgcccctgaggaaaagaccatcagcaaggccaagggccagcctagggaaccccaggtttacacactgcctccaagccgcgaggaaatgaccaagaaccaggtgtccctgacctgcctcgtgaagggcttctacccttccgatatcgccgtggaatgggagagcaatggccagcctgagaacaactacaagacaacccctcctgtgctggacagcgacggctcattcttcctgtacagcaagctgaccgtggacaagtccagatggcagcagggcaacgtgttcagctgtagcgtgctgcacgaagccctgcacagccactacacccagaaaagcctgtctctgagccccggcaaatgataa

SEQ ID NO: 558 - DNA, 1653 bp, synthetic construct
  source 1..1653: mol_type = other DNA
atggattggatctggcgcatcctgtttctcgtgggagctgccacaggcgcccactctcaagttcacctgacacagtctggccccgaagtgcggaagcctggcacaagcgtgaaggtgtcctgtaaagcccctggcaacaccctgaaaacctacgacctgcactgggtccgatctgtgcctggacaaggactgcagtggatgggctggattagccacgagggcgacaagaaagtgatcgtggaacggttcaaggccaaagtgaccatcgactgggacagaagcaccaacaccgcctacctgcagctgagcggactgacatctggcgataccgccgtgtactactgtgccaagggcagcaagcaccggctgagagattacgccctgtacgacgatgacggcgccctgaattgggccgtcgatgtggactacctgagcaacctggaattctggggccagggaacagccgtgacagtgtcttccggcggcggaggaagcggagggggaggctctggaggtggtggctctggtggcggaggctcaggcggtggcggatctgattttgtgctgacacagagccctcacagcctgagcgttacacctggcgagagcgccagcatcagctgcaagtctagccactctctgatccacggcgaccggaacaactacctggcttggtacgtgcagaagcccggcagatctcctcagctgctgatctacctggccagcagcagagctagcggcgtgccagatagattttctggcagcggcagcgacaaggatttcaccctgaagatctccagagtggaaaccgaggacgtgggcacctactactgtatgcagggcagagagagcccctggacatttggccagggcaccaaggtggacatcaaaggcggaggtggaagtggtggtggcggtagcggaggcggtgggtccggaggtggtggatctgaacctaagagcagcgacaagacccacacctgtcctccatgtcctgctccagaactgctggccggaccttccgtgttcctgtttcctccaaagcctaaggacaccctgatgatcagcagaacccctgaagtgacctgcgtggtggtggatgtgtctcacgaggaccctgaagtgaagttcaattggtacgtggacggcgtggaagtgcacaacgccaagaccaagcctagagaggaacagtacaacagcacctacagagtggtgtccgtgctgaccgtgctgcaccaggattggctgaacggcaaagagtacaagtgcaaggtgtccaacaaggccctgcctgcccctatcgaaaagaccatcagcaaggccaagggccagcctagggaaccccaggtttacacactgcctccaagccgcgaggaaatgaccaagaaccaggtgtccctgacctgcctcgtgaagggcttctacccttccgatatcgccgtggaatgggagagcaatggccagcctgagaacaactacaagacaacccctcctgtgctggacagcgacggctcattcttcctgtacagcaagctgaccgtggacaagtccagatggcagcagggcaacgtgttcagctgtagcgtgctgcacgaagccctgcacagccactacacccagaaaagcctgtctctgagccccggcaaatgataa

SEQ ID NO: 559 - DNA, 1653 bp, synthetic construct
  source 1..1653: mol_type = other DNA
atggattggatctggcgcatcctgtttctcgtgggagctgccacaggcgcccactctcaagttcacctgacacagtctggccccgaagtgcggaagcctggcacaagcgtgaaggtgtcctgtaaagcccctggcaacaccctgaaaacctacgacctgcactgggtccgatctgtgcctggacaaggactgcagtggatgggctggattagccacgagggcgacaagaaagtgatcgtggaacggttcaaggccaaagtgaccatcgactgggacagaagcaccaacaccgcctacctgcagctgagcggactgacatctggcgataccgccgtgtactactgtgccaagggcagcaagcaccggctgagagattacgccctgtacgacgatgacggcgccctgaattgggccgtcgatgtggactacctgagcaacctggaattctggggccagggaacagccgtgacagtgtcttccggcggcggaggaagcggagggggaggctctggaggtggtggctctggtggcggaggctcaggcggtggcggatctgattttgtgctgacacagagccctcacagcctgagcgttacacctggcgagagcgccagcatcagctgcaagtctagccactctctgatccacggcgaccggaacaactacctggcttggtacgtgcagaagcccggcagatctcctcagctgctgatctacctggccagcagcagagctagcggcgtgccagatagattttctggcagcggcagcgacaaggatttcaccctgaagatctccagagtggaaaccgaggacgtgggcacctactactgtatgcagggcagagagagcccctggacatttggccagggcaccaaggtggacatcaaaggcggaggtggaagtggtggtggcggtagcggaggcggtgggtccggaggtggtggatctgaacctaagagcagcgacaagacccacacctgtcctccatgtcctgctccagaactgctgggcggaccttccgtgttcctgtttcctccaaagcctaaggacaccctgatgatcagcagaacccctgaagtgacctgcgtggtggtggatgtgtctcacgaggaccctgaagtgaagttcaattggtacgtggacggcgtggaagtgcacaacgccaagaccaagcctagagaggaacagtacaacagcacctacagagtggtgtccgtgctgaccgtgctgcaccaggattggctgaacggcaaagagtacaagtgcaaggtgtccaacaaggccctgcctgcccctgaggaaaagaccatcagcaaggccaagggccagcctagggaaccccaggtttacacactgcctccaagccgcgaggaaatgaccaagaaccaggtgtccctgacctgcctcgtgaagggcttctacccttccgatatcgccgtggaatgggagagcaatggccagcctgagaacaactacaagacaacccctcctgtgctggacagcgacggctcattcttcctgtacagcaagctgaccgtggacaagtccagatggcagcagggcaacgtgttcagctgtagcgtgctgcacgaagccctgcacagccactacacccagaaaagcctgtctctgagccccggcaaatgataa

SEQ ID NO: 560 - DNA, 1653 bp, synthetic construct
  source 1..1653: mol_type = other DNA
atggattggatctggcgcatcctgtttctcgtgggagctgccacaggcgcccactctcaagttcacctgacacagtctggccccgaagtgcggaagcctggcacaagcgtgaaggtgtcctgtaaagcccctggcaacaccctgaaaacctacgacctgcactgggtccgatctgtgcctggacaaggactgcagtggatgggctggattagccacgagggcgacaagaaagtgatcgtggaacggttcaaggccaaagtgaccatcgactgggacagaagcaccaacaccgcctacctgcagctgagcggactgacatctggcgataccgccgtgtactactgtgccaagggcagcaagcaccggctgagagattacgccctgtacgacgatgacggcgccctgaattgggccgtcgatgtggactacctgagcaacctggaattctggggccagggaacagccgtgacagtgtcttccggcggcggaggaagcggagggggaggctctggaggtggtggctctggtggcggaggctcaggcggtggcggatctgattttgtgctgacacagagccctcacagcctgagcgttacacctggcgagagcgccagcatcagctgcaagtctagccactctctgatccacggcgaccggaacaactacctggcttggtacgtgcagaagcccggcagatctcctcagctgctgatctacctggccagcagcagagctagcggcgtgccagatagattttctggcagcggcagcgacaaggatttcaccctgaagatctccagagtggaaaccgaggacgtgggcacctactactgtatgcagggcagagagagcccctggacatttggccagggcaccaaggtggacatcaaaggcggaggtggaagtggtggtggcggtagcggaggcggtgggtccggaggtggtggatctgaacctaagagcagcgacaagacccacacctgtcctccatgtcctgctccagaactgctcggcggaccttccgtgttcctgtttcctccaaagcctaaggacaccctgatgatcagcagaacccctgaagtgacctgcgtggtggtggatgtgtctcacgaggaccccgaagtgaagttcaattggtacgtggacggcgtggaagtgcacaacgccaagaccaagcctagagaggaacagtacaacagcacctacagagtggtgtccgtgctgacagtgctgcaccaggattggctgaacggcaaagagtacaagtgcaaggtgtccaacaaggccctgcctgctcctatcgagaaaaccatcagcaaggccaagggccagcctagggaaccccaagtctgtacactgcctcctagccgcgaggaaatgaccaagaaccaggtgtccctgagctgcgccgtgaagggcttttacccttccgatatcgccgtggaatgggagagcaatggccagcctgagaacaactacaagacaacccctcctgtgctggacagcgacggctcattcttcctggtgtccaagctgacagtggacaagagcagatggcagcagggcaacgtgttcagctgctctgtgctgcacgaagccctgcacagccactacacccagaagtccctgtctctgagccccggcaagtgataa

SEQ ID NO: 561 - DNA, 1653 bp, synthetic construct
  source 1..1653: mol_type = other DNA
atggattggatctggcgcatcctgtttctcgtgggagctgccacaggcgcccactctcaagttcacctgacacagtctggccccgaagtgcggaagcctggcacaagcgtgaaggtgtcctgtaaagcccctggcaacaccctgaaaacctacgacctgcactgggtccgatctgtgcctggacaaggactgcagtggatgggctggattagccacgagggcgacaagaaagtgatcgtggaacggttcaaggccaaagtgaccatcgactgggacagaagcaccaacaccgcctacctgcagctgagcggactgacatctggcgataccgccgtgtactactgtgccaagggcagcaagcaccggctgagagattacgccctgtacgacgatgacggcgccctgaattgggccgtcgatgtggactacctgagcaacctggaattctggggccagggaacagccgtgacagtgtcttccggcggcggaggaagcggagggggaggctctggaggtggtggctctggtggcggaggctcaggcggtggcggatctgattttgtgctgacacagagccctcacagcctgagcgttacacctggcgagagcgccagcatcagctgcaagtctagccactctctgatccacggcgaccggaacaactacctggcttggtacgtgcagaagcccggcagatctcctcagctgctgatctacctggccagcagcagagctagcggcgtgccagatagattttctggcagcggcagcgacaaggatttcaccctgaagatctccagagtggaaaccgaggacgtgggcacctactactgtatgcagggcagagagagcccctggacatttggccagggcaccaaggtggacatcaaaggcggaggtggaagtggtggtggcggtagcggaggcggtgggtccggaggtggtggatctgaacctaagagcagcgacaagacccacacctgtcctccatgtcctgctccagaactgctggccggaccttccgtgttcctgtttcctccaaagcctaaggacaccctgatgatcagcagaacccctgaagtgacctgcgtggtggtggatgtgtctcacgaggaccccgaagtgaagttcaattggtacgtggacggcgtggaagtgcacaatgccaagaccaagcctagagaggaacagtacaacagcacctacagagtggtgtccgtgctgaccgtgctgcaccaggattggctgaacggcaaagagtacaagtgcaaggtgtccaacaaggccctgcctctgcctgaggaaaagaccatcagcaaggccaagggccagcctagggaaccccaagtctgtacactgcctcctagccgcgaggaaatgaccaagaaccaggtgtccctgagctgcgccgtgaagggcttttacccttccgatatcgccgtggaatgggagagcaatggccagcctgagaacaactacaagacaacccctcctgtgctggacagcgacggctcattcttcctggtgtccaagctgacagtggacaagagcagatggcagcagggcaacgtgttcagctgctctgtgctgcacgaagccctgcacagccactacacccagaagtccctgtctctgagccccggcaagtgataa

SEQ ID NO: 562 - DNA, 1653 bp, synthetic construct
  source 1..1653: mol_type = other DNA
atggattggatctggcgcatcctgtttctcgtgggagctgccacaggcgcccactctcaagttcacctgacacagtctggccccgaagtgcggaagcctggcacaagcgtgaaggtgtcctgtaaagcccctggcaacaccctgaaaacctacgacctgcactgggtccgatctgtgcctggacaaggactgcagtggatgggctggattagccacgagggcgacaagaaagtgatcgtggaacggttcaaggccaaagtgaccatcgactgggacagaagcaccaacaccgcctacctgcagctgagcggactgacatctggcgataccgccgtgtactactgtgccaagggcagcaagcaccggctgagagattacgccctgtacgacgatgacggcgccctgaattgggccgtcgatgtggactacctgagcaacctggaattctggggccagggaacagccgtgacagtgtcttccggcggcggaggaagcggagggggaggctctggaggtggtggctctggtggcggaggctcaggcggtggcggatctgattttgtgctgacacagagccctcacagcctgagcgttacacctggcgagagcgccagcatcagctgcaagtctagccactctctgatccacggcgaccggaacaactacctggcttggtacgtgcagaagcccggcagatctcctcagctgctgatctacctggccagcagcagagctagcggcgtgccagatagattttctggcagcggcagcgacaaggatttcaccctgaagatctccagagtggaaaccgaggacgtgggcacctactactgtatgcagggcagagagagcccctggacatttggccagggcaccaaggtggacatcaaaggcggaggtggaagtggtggtggcggtagcggaggcggtgggtccggaggtggtggatctgaacctaagagcagcgacaagacccacacctgtcctccatgtcctgctccagaactgctggccggaccttccgtgttcctgtttcctccaaagcctaaggacaccctgatgatcagcagaacccctgaagtgacctgcgtggtggtggatgtgtctcacgaggaccctgaagtgaagttcaattggtacgtggacggcgtggaagtgcacaacgccaagaccaagcctagagaggaacagtacaacagcacctacagagtggtgtccgtgctgaccgtgctgcaccaggattggctgaacggcaaagagtacaagtgcaaggtgtccaacaaggccctgcctgcccctgaggaaaagaccatcagcaaggccaagggccagcctagggaaccccaagtctgtacactgcctcctagccgcgaggaaatgaccaagaaccaggtgtccctgagctgcgccgtgaagggcttttacccttccgatatcgccgtggaatgggagagcaatggccagcctgagaacaactacaagacaacccctcctgtgctggacagcgacggctcattcttcctggtgtccaagctgacagtggacaagagcagatggcagcagggcaacgtgttcagctgctctgtgctgcacgaagccctgcacagccactacacccagaagtccctgtctctgagccccggcaagtgataa

SEQ ID NO: 563 - DNA, 1653 bp, synthetic construct
  source 1..1653: mol_type = other DNA
atggattggatctggcgcatcctgtttctcgtgggagctgccacaggcgcccactctcaagttcacctgacacagtctggccccgaagtgcggaagcctggcacaagcgtgaaggtgtcctgtaaagcccctggcaacaccctgaaaacctacgacctgcactgggtccgatctgtgcctggacaaggactgcagtggatgggctggattagccacgagggcgacaagaaagtgatcgtggaacggttcaaggccaaagtgaccatcgactgggacagaagcaccaacaccgcctacctgcagctgagcggactgacatctggcgataccgccgtgtactactgtgccaagggcagcaagcaccggctgagagattacgccctgtacgacgatgacggcgccctgaattgggccgtcgatgtggactacctgagcaacctggaattctggggccagggaacagccgtgacagtgtcttccggcggcggaggaagcggagggggaggctctggaggtggtggctctggtggcggaggctcaggcggtggcggatctgattttgtgctgacacagagccctcacagcctgagcgttacacctggcgagagcgccagcatcagctgcaagtctagccactctctgatccacggcgaccggaacaactacctggcttggtacgtgcagaagcccggcagatctcctcagctgctgatctacctggccagcagcagagctagcggcgtgccagatagattttctggcagcggcagcgacaaggatttcaccctgaagatctccagagtggaaaccgaggacgtgggcacctactactgtatgcagggcagagagagcccctggacatttggccagggcaccaaggtggacatcaaaggcggaggtggaagtggtggtggcggtagcggaggcggtgggtccggaggtggtggatctgaacctaagagcagcgacaagacccacacctgtcctccatgtcctgctccagaactgctggccggaccttccgtgttcctgtttcctccaaagcctaaggacaccctgatgatcagcagaacccctgaagtgacctgcgtggtggtggatgtgtctcacgaggaccctgaagtgaagttcaattggtacgtggacggcgtggaagtgcacaacgccaagaccaagcctagagaggaacagtacaacagcacctacagagtggtgtccgtgctgaccgtgctgcaccaggattggctgaacggcaaagagtacaagtgcaaggtgtccaacaaggccctgcctgcccctatcgaaaagaccatcagcaaggccaagggccagcctagggaaccccaagtctgtacactgcctcctagccgcgaggaaatgaccaagaaccaggtgtccctgagctgcgccgtgaagggcttttacccttccgatatcgccgtggaatgggagagcaatggccagcctgagaacaactacaagacaacccctcctgtgctggacagcgacggctcattcttcctggtgtccaagctgacagtggacaagagcagatggcagcagggcaacgtgttcagctgctctgtgctgcacgaagccctgcacagccactacacccagaagtccctgtctctgagccccggcaagtgataa

SEQ ID NO: 564 - DNA, 1653 bp, synthetic construct
  source 1..1653: mol_type = other DNA
atggattggatctggcgcatcctgtttctcgtgggagctgccacaggcgcccactctcaagttcacctgacacagtctggccccgaagtgcggaagcctggcacaagcgtgaaggtgtcctgtaaagcccctggcaacaccctgaaaacctacgacctgcactgggtccgatctgtgcctggacaaggactgcagtggatgggctggattagccacgagggcgacaagaaagtgatcgtggaacggttcaaggccaaagtgaccatcgactgggacagaagcaccaacaccgcctacctgcagctgagcggactgacatctggcgataccgccgtgtactactgtgccaagggcagcaagcaccggctgagagattacgccctgtacgacgatgacggcgccctgaattgggccgtcgatgtggactacctgagcaacctggaattctggggccagggaacagccgtgacagtgtcttccggcggcggaggaagcggagggggaggctctggaggtggtggctctggtggcggaggctcaggcggtggcggatctgattttgtgctgacacagagccctcacagcctgagcgttacacctggcgagagcgccagcatcagctgcaagtctagccactctctgatccacggcgaccggaacaactacctggcttggtacgtgcagaagcccggcagatctcctcagctgctgatctacctggccagcagcagagctagcggcgtgccagatagattttctggcagcggcagcgacaaggatttcaccctgaagatctccagagtggaaaccgaggacgtgggcacctactactgtatgcagggcagagagagcccctggacatttggccagggcaccaaggtggacatcaaaggcggaggtggaagtggtggtggcggtagcggaggcggtgggtccggaggtggtggatctgaacctaagagcagcgacaagacccacacctgtcctccatgtcctgctccagaactgctgggcggaccttccgtgttcctgtttcctccaaagcctaaggacaccctgatgatcagcagaacccctgaagtgacctgcgtggtggtggatgtgtctcacgaggaccctgaagtgaagttcaattggtacgtggacggcgtggaagtgcacaacgccaagaccaagcctagagaggaacagtacaacagcacctacagagtggtgtccgtgctgaccgtgctgcaccaggattggctgaacggcaaagagtacaagtgcaaggtgtccaacaaggccctgcctgcccctgaggaaaagaccatcagcaaggccaagggccagcctagggaaccccaagtctgtacactgcctcctagccgcgaggaaatgaccaagaaccaggtgtccctgagctgcgccgtgaagggcttttacccttccgatatcgccgtggaatgggagagcaatggccagcctgagaacaactacaagacaacccctcctgtgctggacagcgacggctcattcttcctggtgtccaagctgacagtggacaagagcagatggcagcagggcaacgtgttcagctgctctgtgctgcacgaagccctgcacagccactacacccagaagtccctgtctctgagccccggcaagtgataa

SEQ ID NO: 565 - DNA, 1653 bp, synthetic construct
  source 1..1653: mol_type = other DNA
atggattggatctggcgcatcctgtttctcgtgggagctgccacaggcgcccactctcaagttcacctgacacagtctggccccgaagtgcggaagcctggcacaagcgtgaaggtgtcctgtaaagcccctggcaacaccctgaaaacctacgacctgcactgggtccgatctgtgcctggacaaggactgcagtggatgggctggattagccacgagggcgacaagaaagtgatcgtggaacggttcaaggccaaagtgaccatcgactgggacagaagcaccaacaccgcctacctgcagctgagcggactgacatctggcgataccgccgtgtactactgtgccaagggcagcaagcaccggctgagagattacgccctgtacgacgatgacggcgccctgaattgggccgtcgatgtggactacctgagcaacctggaattctggggccagggaacagccgtgacagtgtcttccggcggcggaggaagcggagggggaggctctggaggtggtggctctggtggcggaggctcaggcggtggcggatctgattttgtgctgacacagagccctcacagcctgagcgttacacctggcgagagcgccagcatcagctgcaagtctagccactctctgatccacggcgaccggaacaactacctggcttggtacgtgcagaagcccggcagatctcctcagctgctgatctacctggccagcagcagagctagcggcgtgccagatagattttctggcagcggcagcgacaaggatttcaccctgaagatctccagagtggaaaccgaggacgtgggcacctactactgtatgcagggcagagagagcccctggacatttggccagggcaccaaggtggacatcaaaggcggaggtggaagtggtggtggcggtagcggaggcggtgggtccggaggtggtggatctgaacctaagagcagcgacaagacccacacctgtcctccatgtcctgctccagaactgctcggcggaccttccgtgttcctgtttcctccaaagcctaaggacaccctgatgatcagcagaacccctgaagtgacctgcgtggtggtggatgtgtctcacgaggaccccgaagtgaagttcaattggtacgtggacggcgtggaagtgcacaacgccaagaccaagcctagagaggaacagtacaacagcacctacagagtggtgtccgtgctgacagtgctgcaccaggattggctgaacggcaaagagtacaagtgcaaggtgtccaacaaggccctgcctgctcctatcgagaaaaccatcagcaaggccaagggccagcctagggaaccccaggtttacaccctgcctccatgccgcgaggaaatgaccaagaaccaggtgtccctgtggtgcctcgtgaagggcttctacccttccgatatcgccgtggaatgggagagcaatggccagcctgagaacaactacaagacaacccctcctgtgctggacagcgacggctcattcttcctgtacagcaagctgaccgtggacaagtccagatggcagcagggcaacgtgttcagctgtagcgtgctgcacgaagccctgcacagccactacacccagaagtccctgtctctgagccccggcaagtgataa

SEQ ID NO: 566 - DNA, 1653 bp, synthetic construct
  source 1..1653: mol_type = other DNA
atggattggatctggcgcatcctgtttctcgtgggagctgccacaggcgcccactctcaagttcacctgacacagtctggccccgaagtgcggaagcctggcacaagcgtgaaggtgtcctgtaaagcccctggcaacaccctgaaaacctacgacctgcactgggtccgatctgtgcctggacaaggactgcagtggatgggctggattagccacgagggcgacaagaaagtgatcgtggaacggttcaaggccaaagtgaccatcgactgggacagaagcaccaacaccgcctacctgcagctgagcggactgacatctggcgataccgccgtgtactactgtgccaagggcagcaagcaccggctgagagattacgccctgtacgacgatgacggcgccctgaattgggccgtcgatgtggactacctgagcaacctggaattctggggccagggaacagccgtgacagtgtcttccggcggcggaggaagcggagggggaggctctggaggtggtggctctggtggcggaggctcaggcggtggcggatctgattttgtgctgacacagagccctcacagcctgagcgttacacctggcgagagcgccagcatcagctgcaagtctagccactctctgatccacggcgaccggaacaactacctggcttggtacgtgcagaagcccggcagatctcctcagctgctgatctacctggccagcagcagagctagcggcgtgccagatagattttctggcagcggcagcgacaaggatttcaccctgaagatctccagagtggaaaccgaggacgtgggcacctactactgtatgcagggcagagagagcccctggacatttggccagggcaccaaggtggacatcaaaggcggaggtggaagtggtggtggcggtagcggaggcggtgggtccggaggtggtggatctgaacctaagagcagcgacaagacccacacctgtcctccatgtcctgctccagaactgctggccggaccttccgtgttcctgtttcctccaaagcctaaggacaccctgatgatcagcagaacccctgaagtgacctgcgtggtggtggatgtgtctcacgaggaccccgaagtgaagttcaattggtacgtggacggcgtggaagtgcacaatgccaagaccaagcctagagaggaacagtacaacagcacctacagagtggtgtccgtgctgaccgtgctgcaccaggattggctgaacggcaaagagtacaagtgcaaggtgtccaacaaggccctgcctctgcctgaggaaaagaccatcagcaaggccaagggccagcctagggaaccccaggtttacaccctgcctccatgccgcgaggaaatgaccaagaaccaggtgtccctgtggtgcctcgtgaagggcttctacccttccgatatcgccgtggaatgggagagcaatggccagcctgagaacaactacaagacaacccctcctgtgctggacagcgacggctcattcttcctgtacagcaagctgaccgtggacaagtccagatggcagcagggcaacgtgttcagctgtagcgtgctgcacgaagccctgcacagccactacacccagaagtccctgtctctgagccccggcaagtgataa

SEQ ID NO: 567 - DNA, 1653 bp, synthetic construct
  source 1..1653: mol_type = other DNA
atggattggatctggcgcatcctgtttctcgtgggagctgccacaggcgcccactctcaagttcacctgacacagtctggccccgaagtgcggaagcctggcacaagcgtgaaggtgtcctgtaaagcccctggcaacaccctgaaaacctacgacctgcactgggtccgatctgtgcctggacaaggactgcagtggatgggctggattagccacgagggcgacaagaaagtgatcgtggaacggttcaaggccaaagtgaccatcgactgggacagaagcaccaacaccgcctacctgcagctgagcggactgacatctggcgataccgccgtgtactactgtgccaagggcagcaagcaccggctgagagattacgccctgtacgacgatgacggcgccctgaattgggccgtcgatgtggactacctgagcaacctggaattctggggccagggaacagccgtgacagtgtcttccggcggcggaggaagcggagggggaggctctggaggtggtggctctggtggcggaggctcaggcggtggcggatctgattttgtgctgacacagagccctcacagcctgagcgttacacctggcgagagcgccagcatcagctgcaagtctagccactctctgatccacggcgaccggaacaactacctggcttggtacgtgcagaagcccggcagatctcctcagctgctgatctacctggccagcagcagagctagcggcgtgccagatagattttctggcagcggcagcgacaaggatttcaccctgaagatctccagagtggaaaccgaggacgtgggcacctactactgtatgcagggcagagagagcccctggacatttggccagggcaccaaggtggacatcaaaggcggaggtggaagtggtggtggcggtagcggaggcggtgggtccggaggtggtggatctgaacctaagagcagcgacaagacccacacctgtcctccatgtcctgctccagaactgctggccggaccttccgtgttcctgtttcctccaaagcctaaggacaccctgatgatcagcagaacccctgaagtgacctgcgtggtggtggatgtgtctcacgaggaccctgaagtgaagttcaattggtacgtggacggcgtggaagtgcacaacgccaagaccaagcctagagaggaacagtacaacagcacctacagagtggtgtccgtgctgaccgtgctgcaccaggattggctgaacggcaaagagtacaagtgcaaggtgtccaacaaggccctgcctgcccctgaggaaaagaccatcagcaaggccaagggccagcctagggaaccccaggtttacaccctgcctccatgccgcgaggaaatgaccaagaaccaggtgtccctgtggtgcctcgtgaagggcttctacccttccgatatcgccgtggaatgggagagcaatggccagcctgagaacaactacaagacaacccctcctgtgctggacagcgacggctcattcttcctgtacagcaagctgaccgtggacaagtccagatggcagcagggcaacgtgttcagctgtagcgtgctgcacgaagccctgcacagccactacacccagaagtccctgtctctgagccccggcaagtgataa

SEQ ID NO: 568 - DNA, 1653 bp, synthetic construct
  source 1..1653: mol_type = other DNA
atggattggatctggcgcatcctgtttctcgtgggagctgccacaggcgcccactctcaagttcacctgacacagtctggccccgaagtgcggaagcctggcacaagcgtgaaggtgtcctgtaaagcccctggcaacaccctgaaaacctacgacctgcactgggtccgatctgtgcctggacaaggactgcagtggatgggctggattagccacgagggcgacaagaaagtgatcgtggaacggttcaaggccaaagtgaccatcgactgggacagaagcaccaacaccgcctacctgcagctgagcggactgacatctggcgataccgccgtgtactactgtgccaagggcagcaagcaccggctgagagattacgccctgtacgacgatgacggcgccctgaattgggccgtcgatgtggactacctgagcaacctggaattctggggccagggaacagccgtgacagtgtcttccggcggcggaggaagcggagggggaggctctggaggtggtggctctggtggcggaggctcaggcggtggcggatctgattttgtgctgacacagagccctcacagcctgagcgttacacctggcgagagcgccagcatcagctgcaagtctagccactctctgatccacggcgaccggaacaactacctggcttggtacgtgcagaagcccggcagatctcctcagctgctgatctacctggccagcagcagagctagcggcgtgccagatagattttctggcagcggcagcgacaaggatttcaccctgaagatctccagagtggaaaccgaggacgtgggcacctactactgtatgcagggcagagagagcccctggacatttggccagggcaccaaggtggacatcaaaggcggaggtggaagtggtggtggcggtagcggaggcggtgggtccggaggtggtggatctgaacctaagagcagcgacaagacccacacctgtcctccatgtcctgctccagaactgctggccggaccttccgtgttcctgtttcctccaaagcctaaggacaccctgatgatcagcagaacccctgaagtgacctgcgtggtggtggatgtgtctcacgaggaccctgaagtgaagttcaattggtacgtggacggcgtggaagtgcacaacgccaagaccaagcctagagaggaacagtacaacagcacctacagagtggtgtccgtgctgaccgtgctgcaccaggattggctgaacggcaaagagtacaagtgcaaggtgtccaacaaggccctgcctgcccctatcgaaaagaccatcagcaaggccaagggccagcctagggaaccccaggtttacaccctgcctccatgccgcgaggaaatgaccaagaaccaggtgtccctgtggtgcctcgtgaagggcttctacccttccgatatcgccgtggaatgggagagcaatggccagcctgagaacaactacaagacaacccctcctgtgctggacagcgacggctcattcttcctgtacagcaagctgaccgtggacaagtccagatggcagcagggcaacgtgttcagctgtagcgtgctgcacgaagccctgcacagccactacacccagaagtccctgtctctgagccccggcaagtgataa

SEQ ID NO: 569 - DNA, 1653 bp, synthetic construct
  source 1..1653: mol_type = other DNA
atggattggatctggcgcatcctgtttctcgtgggagctgccacaggcgcccactctcaagttcacctgacacagtctggccccgaagtgcggaagcctggcacaagcgtgaaggtgtcctgtaaagcccctggcaacaccctgaaaacctacgacctgcactgggtccgatctgtgcctggacaaggactgcagtggatgggctggattagccacgagggcgacaagaaagtgatcgtggaacggttcaaggccaaagtgaccatcgactgggacagaagcaccaacaccgcctacctgcagctgagcggactgacatctggcgataccgccgtgtactactgtgccaagggcagcaagcaccggctgagagattacgccctgtacgacgatgacggcgccctgaattgggccgtcgatgtggactacctgagcaacctggaattctggggccagggaacagccgtgacagtgtcttccggcggcggaggaagcggagggggaggctctggaggtggtggctctggtggcggaggctcaggcggtggcggatctgattttgtgctgacacagagccctcacagcctgagcgttacacctggcgagagcgccagcatcagctgcaagtctagccactctctgatccacggcgaccggaacaactacctggcttggtacgtgcagaagcccggcagatctcctcagctgctgatctacctggccagcagcagagctagcggcgtgccagatagattttctggcagcggcagcgacaaggatttcaccctgaagatctccagagtggaaaccgaggacgtgggcacctactactgtatgcagggcagagagagcccctggacatttggccagggcaccaaggtggacatcaaaggcggaggtggaagtggtggtggcggtagcggaggcggtgggtccggaggtggtggatctgaacctaagagcagcgacaagacccacacctgtcctccatgtcctgctccagaactgctgggcggaccttccgtgttcctgtttcctccaaagcctaaggacaccctgatgatcagcagaacccctgaagtgacctgcgtggtggtggatgtgtctcacgaggaccctgaagtgaagttcaattggtacgtggacggcgtggaagtgcacaacgccaagaccaagcctagagaggaacagtacaacagcacctacagagtggtgtccgtgctgaccgtgctgcaccaggattggctgaacggcaaagagtacaagtgcaaggtgtccaacaaggccctgcctgcccctgaggaaaagaccatcagcaaggccaagggccagcctagggaaccccaggtttacaccctgcctccatgccgcgaggaaatgaccaagaaccaggtgtccctgtggtgcctcgtgaagggcttctacccttccgatatcgccgtggaatgggagagcaatggccagcctgagaacaactacaagacaacccctcctgtgctggacagcgacggctcattcttcctgtacagcaagctgaccgtggacaagtccagatggcagcagggcaacgtgttcagctgtagcgtgctgcacgaagccctgcacagccactacacccagaagtccctgtctctgagccccggcaagtgataa

SEQ ID NO: 570 - DNA, 1653 bp, synthetic construct; identical to SEQ ID NO: 554
  source 1..1653: mol_type = other DNA

SEQ ID NO: 571 - DNA, 1653 bp, synthetic construct; identical to SEQ ID NO: 555
  source 1..1653: mol_type = other DNA

SEQ ID NO: 572 - DNA, 1653 bp, synthetic construct; identical to SEQ ID NO: 556
  source 1..1653: mol_type = other DNA

SEQ ID NO: 573 - DNA, 1653 bp, synthetic construct; identical to SEQ ID NO: 557
  source 1..1653: mol_type = other DNA

SEQ ID NO: 574 - DNA, 1653 bp, synthetic construct; identical to SEQ ID NO: 558
  source 1..1653: mol_type = other DNA

SEQ ID NO: 575 - DNA, 1653 bp, synthetic construct; identical to SEQ ID NO: 559
  source 1..1653: mol_type = other DNA

SEQ ID NO: 576 - DNA, 1653 bp, synthetic construct; identical to SEQ ID NO: 560
  source 1..1653: mol_type = other DNA

SEQ ID NO: 577 - DNA, 1653 bp, synthetic construct; identical to SEQ ID NO: 561
  source 1..1653: mol_type = other DNA

SEQ ID NO: 578 - DNA, 1653 bp, synthetic construct; identical to SEQ ID NO: 562
  source 1..1653: mol_type = other DNA

SEQ ID NO: 579 - DNA, 1653 bp, synthetic construct; identical to SEQ ID NO: 563
  source 1..1653: mol_type = other DNA

SEQ ID NO: 580 - DNA, 1653 bp, synthetic construct; identical to SEQ ID NO: 564
  source 1..1653: mol_type = other DNA

SEQ ID NO: 581 - DNA, 1653 bp, synthetic construct; identical to SEQ ID NO: 565
  source 1..1653: mol_type = other DNA

SEQ ID NO: 582 - DNA, 1653 bp, synthetic construct; identical to SEQ ID NO: 566
  source 1..1653: mol_type = other DNA

SEQ ID NO: 583 - DNA, 1653 bp, synthetic construct; identical to SEQ ID NO: 567
  source 1..1653: mol_type = other DNA

SEQ ID NO: 584 - DNA, 1653 bp, synthetic construct; identical to SEQ ID NO: 568
  source 1..1653: mol_type = other DNA

SEQ ID NO: 585 - DNA, 1653 bp, synthetic construct; identical to SEQ ID NO: 569
  source 1..1653: mol_type = other DNA

SEQ ID NO: 586 - DNA, 1653 bp, synthetic construct
  source 1..1653: mol_type = other DNA
atggattggatctggcgcatcctgtttctcgtgggagctgccacaggcgcccactctcaagttcacctgacacagtctggccccgaagtgcggaagcctggcacaagcgtgaaggtgtcctgtaaagcccctggcaacaccctgaaaacctacgacctgcactgggtccgatctgtgcctggacaaggactgcagtggatgggctggattagccacgagggcgacaagaaagtgatcgtggaacggttcaaggccaaagtgaccatcgactgggacagaagcaccaacaccgcctacctgcagctgagcggactgacatctggcgataccgccgtgtactactgtgccaagggcagcaagcaccggctgagagattacgccctgtacgacgatgacggcgccctgaattgggccgtcgatgtggactacctgagcaacctggaattctggggccagggaacagccgtgacagtgtcttccggcggcggaggaagcggagggggaggctctggaggtggtggctctggtggcggaggctcaggcggtggcggatctgattttgtgctgacacagagccctcacagcctgagcgttacacctggcgagagcgccagcatcagctgcaagtctagccactctctgatccacggcgaccggaacaactacctggcttggtacgtgcagaagcccggcagatctcctcagctgctgatctacctggccagcagcagagctagcggcgtgccagatagattttctggcagcggcagcgacaaggatttcaccctgaagatctccagagtggaaaccgaggacgtgggcacctactactgtatgcagggcagagagagcccctggacatttggccagggcaccaaggtggacatcaaaggcggaggtggaagtggtggtggcggtagcggaggcggtgggtccggaggtggtggatctgaacctaagagcagcgacaagacccacacctgtcctccatgtcctgctccagaactgctcggcggaccttccgtgttcctgtttcctccaaagcctaaggacaccctgatgatcagcagaacccctgaagtgacctgcgtggtggtggatgtgtctcacgaggaccccgaagtgaagttcaattggtacgtggacggcgtggaagtgcacaacgccaagaccaagcctagagaggaacagtacaacagcacctacagagtggtgtccgtgctgacagtgctgcaccaggattggctgaacggcaaagagtacaagtgcaaggtgtccaacaaggccctgcctgctcctatcgagaaaaccatcagcaaggccaagggccagcctagggaaccccaggtttacacactgcctccaagccgcgacgaactgaccaagaaccaggtgtccctgacctgcctcgtgaagggcttctacccttccgatatcgccgtggaatgggagagcaatggccagcctgagaacaactacaagacaacccctcctgtgctggacagcgacggctcattcttcctgtacagcaagctgactgtggataagtcccggtggcagcagggcaacgtgttcagctgttctgtgatgcacgaagccctgcacaaccactacacccagaaaagcctgtctctgagccccggcaagtgataa

SEQ ID NO: 587 - DNA, 1653 bp, synthetic construct
  source 1..1653: mol_type = other DNA
atggattggatctggcgcatcctgtttctcgtgggagctgccacaggcgcccactctcaagttcacctgacacagtctggccccgaagtgcggaagcctggcacaagcgtgaaggtgtcctgtaaagcccctggcaacaccctgaaaacctacgacctgcactgggtccgatctgtgcctggacaaggactgcagtggatgggctggattagccacgagggcgacaagaaagtgatcgtggaacggttcaaggccaaagtgaccatcgactgggacagaagcaccaacaccgcctacctgcagctgagcggactgacatctggcgataccgccgtgtactactgtgccaagggcagcaagcaccggctgagagattacgccctgtacgacgatgacggcgccctgaattgggccgtcgatgtggactacctgagcaacctggaattctggggccagggaacagccgtgacagtgtcttccggcggcggaggaagcggagggggaggctctggaggtggtggctctggtggcggaggctcaggcggtggcggatctgattttgtgctgacacagagccctcacagcctgagcgttacacctggcgagagcgccagcatcagctgcaagtctagccactctctgatccacggcgaccggaacaactacctggcttggtacgtgcagaagcccggcagatctcctcagctgctgatctacctggccagcagcagagctagcggcgtgccagatagattttctggcagcggcagcgacaaggatttcaccctgaagatctccagagtggaaaccgaggacgtgggcacctactactgtatgcagggcagagagagcccctggacatttggccagggcaccaaggtggacatcaaaggcggaggtggaagtggtggtggcggtagcggaggcggtgggtccggaggtggtggatctgaacctaagagcagcgacaagacccacacctgtcctccatgtcctgctccagaactgctcggcggaccttccgtgttcctgtttcctccaaagcctaaggacaccctgatgatcagcagaacccctgaagtgacctgcgtggtggtggatgtgtctcacgaggaccccgaagtgaagttcaattggtacgtggacggcgtggaagtgcacaacgccaagaccaagcctagagaggaacagtacaacagcacctacagagtggtgtccgtgctgacagtgctgcaccaggattggctgaacggcaaagagtacaagtgcaaggtgtccaacaaggccctgcctgctcctatcgagaaaaccatcagcaaggccaagggccagcctagggaaccccaggtttacacactgcctccaagccgcgacgaactgaccaagaaccaggtgtccctgacctgcctcgtgaagggcttctacccttccgatatcgccgtggaatgggagagcaatggccagcctgagaacaactacaagacaacccctcctgtgctggacagcgacggctcattcttcctgtacagcaagctgaccgtggacaagtccagatggcagcagggcaacgtgttcagctgtagcgtgctgcacgaagccctgcacagccactacacccagaaaagcctgtctctgagccccggcaaatgataa

SEQ ID NO: 588 - DNA, 1653 bp, synthetic construct
  source 1..1653: mol_type = other DNA
atggattggatctggcgcatcctgtttctcgtgggagctgccacaggcgcccactctcaagttcacctgacacagtctggccccgaagtgcggaagcctggcacaagcgtgaaggtgtcctgtaaagcccctggcaacaccctgaaaacctacgacctgcactgggtccgatctgtgcctggacaaggactgcagtggatgggctggattagccacgagggcgacaagaaagtgatcgtggaacggttcaaggccaaagtgaccatcgactgggacagaagcaccaacaccgcctacctgcagctgagcggactgacatctggcgataccgccgtgtactactgtgccaagggcagcaagcaccggctgagagattacgccctgtacgacgatgacggcgccctgaattgggccgtcgatgtggactacctgagcaacctggaattctggggccagggaacagccgtgacagtgtcttccggcggcggaggaagcggagggggaggctctggaggtggtggctctggtggcggaggctcaggcggtggcggatctgattttgtgctgacacagagccctcacagcctgagcgttacacctggcgagagcgccagcatcagctgcaagtctagccactctctgatccacggcgaccggaacaactacctggcttggtacgtgcagaagcccggcagatctcctcagctgctgatctacctggccagcagcagagctagcggcgtgccagatagattttctggcagcggcagcgacaaggatttcaccctgaagatctccagagtggaaaccgaggacgtgggcacctactactgtatgcagggcagagagagcccctggacatttggccagggcaccaaggtggacatcaaaggcggaggtggaagtggtggtggcggtagcggaggcggtgggtccggaggtggtggatctgaacctaagagcagcgacaagacccacacctgtcctccatgtcctgctccagaactgctggccggaccttccgtgttcctgtttcctccaaagcctaaggacaccctgatgatcagcagaacccctgaagtgacctgcgtggtggtggatgtgtctcacgaggaccccgaagtgaagttcaattggtacgtggacggcgtggaagtgcacaatgccaagaccaagcctagagaggaacagtacaacagcacctacagagtggtgtccgtgctgaccgtgctgcaccaggattggctgaacggcaaagagtacaagtgcaaggtgtccaacaaggccctgcctctgcctgaggaaaagaccatcagcaaggccaagggccagcctagggaaccccaggtttacacactgcctccaagccgcgacgaactgaccaagaaccaggtgtccctgacctgcctcgtgaagggcttctacccttccgatatcgccgtggaatgggagagcaatggccagcctgagaacaactacaagacaacccctcctgtgctggacagcgacggctcattcttcctgtacagcaagctgaccgtggacaagtccagatggcagcagggcaacgtgttcagctgtagcgtgctgcacgaagccctgcacagccactacacccagaaaagcctgtctctgagccccggcaaatgataa

SEQ ID NO: 589 - DNA, 1653 bp, synthetic construct
  source 1..1653: mol_type = other DNA
atggattggatctggcgcatcctgtttctcgtgggagctgccacaggcgcccactctcaagttcacctgacacagtctggccccgaagtgcggaagcctggcacaagcgtgaaggtgtcctgtaaagcccctggcaacaccctgaaaacctacgacctgcactgggtccgatctgtgcctggacaaggactgcagtggatgggctggattagccacgagggcgacaagaaagtgatcgtggaacggttcaaggccaaagtgaccatcgactgggacagaagcaccaacaccgcctacctgcagctgagcggactgacatctggcgataccgccgtgtactactgtgccaagggcagcaagcaccggctgagagattacgccctgtacgacgatgacggcgccctgaattgggccgtcgatgtggactacctgagcaacctggaattctggggccagggaacagccgtgacagtgtcttccggcggcggaggaagcggagggggaggctctggaggtggtggctctggtggcggaggctcaggcggtggcggatctgattttgtgctgacacagagccctcacagcctgagcgttacacctggcgagagcgccagcatcagctgcaagtctagccactctctgatccacggcgaccggaacaactacctggcttggtacgtgcagaagcccggcagatctcctcagctgctgatctacctggccagcagcagagctagcggcgtgccagatagattttctggcagcggcagcgacaaggatttcaccctgaagatctccagagtggaaaccgaggacgtgggcacctactactgtatgcagggcagagagagcccctggacatttggccagggcaccaaggtggacatcaaaggcggaggtggaagtggtggtggcggtagcggaggcggtgggtccggaggtggtggatctgaacctaagagcagcgacaagacccacacctgtcctccatgtcctgctccagaactgctggccggaccttccgtgttcctgtttcctccaaagcctaaggacaccctgatgatcagcagaacccctgaagtgacctgcgtggtggtggatgtgtctcacgaggaccctgaagtgaagttcaattggtacgtggacggcgtggaagtgcacaacgccaagaccaagcctagagaggaacagtacaacagcacctacagagtggtgtccgtgctgaccgtgctgcaccaggattggctgaacggcaaagagtacaagtgcaaggtgtccaacaaggccctgcctgcccctgaggaaaagaccatcagcaaggccaagggccagcctagggaaccccaggtttacacactgcctccaagccgcgacgaactgaccaagaaccaggtgtccctgacctgcctcgtgaagggcttctacccttccgatatcgccgtggaatgggagagcaatggccagcctgagaacaactacaagacaacccctcctgtgctggacagcgacggctcattcttcctgtacagcaagctgaccgtggacaagtccagatggcagcagggcaacgtgttcagctgtagcgtgctgcacgaagccctgcacagccactacacccagaaaagcctgtctctgagccccggcaaatgataa

SEQ ID NO: 590 - DNA, 1653 bp, synthetic construct
  source 1..1653: mol_type = other DNA
atggattggatctggcgcatcctgtttctcgtgggagctgccacaggcgcccactctcaagttcacctgacacagtctggccccgaagtgcggaagcctggcacaagcgtgaaggtgtcctgtaaagcccctggcaacaccctgaaaacctacgacctgcactgggtccgatctgtgcctggacaaggactgcagtggatgggctggattagccacgagggcgacaagaaagtgatcgtggaacggttcaaggccaaagtgaccatcgactgggacagaagcaccaacaccgcctacctgcagctgagcggactgacatctggcgataccgccgtgtactactgtgccaagggcagcaagcaccggctgagagattacgccctgtacgacgatgacggcgccctgaattgggccgtcgatgtggactacctgagcaacctggaattctggggccagggaacagccgtgacagtgtcttccggcggcggaggaagcggagggggaggctctggaggtggtggctctggtggcggaggctcaggcggtggcggatctgattttgtgctgacacagagccctcacagcctgagcgttacacctggcgagagcgccagcatcagctgcaagtctagccactctctgatccacggcgaccggaacaactacctggcttggtacgtgcagaagcccggcagatctcctcagctgctgatctacctggccagcagcagagctagcggcgtgccagatagattttctggcagcggcagcgacaaggatttcaccctgaagatctccagagtggaaaccgaggacgtgggcacctactactgtatgcagggcagagagagcccctggacatttggccagggcaccaaggtggacatcaaaggcggaggtggaagtggtggtggcggtagcggaggcggtgggtccggaggtggtggatctgaacctaagagcagcgacaagacccacacctgtcctccatgtcctgctccagaactgctggccggaccttccgtgttcctgtttcctccaaagcctaaggacaccctgatgatcagcagaacccctgaagtgacctgcgtggtggtggatgtgtctcacgaggaccctgaagtgaagttcaattggtacgtggacggcgtggaagtgcacaacgccaagaccaagcctagagaggaacagtacaacagcacctacagagtggtgtccgtgctgaccgtgctgcaccaggattggctgaacggcaaagagtacaagtgcaaggtgtccaacaaggccctgcctgcccctatcgaaaagaccatcagcaaggccaagggccagcctagggaaccccaggtttacacactgcctccaagccgcgacgaactgaccaagaaccaggtgtccctgacctgcctcgtgaagggcttctacccttccgatatcgccgtggaatgggagagcaatggccagcctgagaacaactacaagacaacccctcctgtgctggacagcgacggctcattcttcctgtacagcaagctgaccgtggacaagtccagatggcagcagggcaacgtgttcagctgtagcgtgctgcacgaagccctgcacagccactacacccagaaaagcctgtctctgagccccggcaaatgataa

SEQ ID NO: 591 - DNA, 1653 bp, synthetic construct
  source 1..1653: mol_type = other DNA
atggattggatctggcgcatcctgtttctcgtgggagctgccacaggcgcccactctcaagttcacctgacacagtctggccccgaagtgcggaagcctggcacaagcgtgaaggtgtcctgtaaagcccctggcaacaccctgaaaacctacgacctgcactgggtccgatctgtgcctggacaaggactgcagtggatgggctggattagccacgagggcgacaagaaagtgatcgtggaacggttcaaggccaaagtgaccatcgactgggacagaagcaccaacaccgcctacctgcagctgagcggactgacatctggcgataccgccgtgtactactgtgccaagggcagcaagcaccggctgagagattacgccctgtacgacgatgacggcgccctgaattgggccgtcgatgtggactacctgagcaacctggaattctggggccagggaacagccgtgacagtgtcttccggcggcggaggaagcggagggggaggctctggaggtggtggctctggtggcggaggctcaggcggtggcggatctgattttgtgctgacacagagccctcacagcctgagcgttacacctggcgagagcgccagcatcagctgcaagtctagccactctctgatccacggcgaccggaacaactacctggcttggtacgtgcagaagcccggcagatctcctcagctgctgatctacctggccagcagcagagctagcggcgtgccagatagattttctggcagcggcagcgacaaggatttcaccctgaagatctccagagtggaaaccgaggacgtgggcacctactactgtatgcagggcagagagagcccctggacatttggccagggcaccaaggtggacatcaaaggcggaggtggaagtggtggtggcggtagcggaggcggtgggtccggaggtggtggatctgaacctaagagcagcgacaagacccacacctgtcctccatgtcctgctccagaactgctgggcggaccttccgtgttcctgtttcctccaaagcctaaggacaccctgatgatcagcagaacccctgaagtgacctgcgtggtggtggatgtgtctcacgaggaccctgaagtgaagttcaattggtacgtggacggcgtggaagtgcacaacgccaagaccaagcctagagaggaacagtacaacagcacctacagagtggtgtccgtgctgaccgtgctgcaccaggattggctgaacggcaaagagtacaagtgcaaggtgtccaacaaggccctgcctgcccctgaggaaaagaccatcagcaaggccaagggccagcctagggaaccccaggtttacacactgcctccaagccgcgacgaactgaccaagaaccaggtgtccctgacctgcctcgtgaagggcttctacccttccgatatcgccgtggaatgggagagcaatggccagcctgagaacaactacaagacaacccctcctgtgctggacagcgacggctcattcttcctgtacagcaagctgaccgtggacaagtccagatggcagcagggcaacgtgttcagctgtagcgtgctgcacgaagccctgcacagccactacacccagaaaagcctgtctctgagccccggcaaatgataa

SEQ ID NO: 592 - DNA, 1653 bp, synthetic construct
  source 1..1653: mol_type = other DNA
atggattggatctggcgcatcctgtttctcgtgggagctgccacaggcgcccactctcaagttcacctgacacagtctggccccgaagtgcggaagcctggcacaagcgtgaaggtgtcctgtaaagcccctggcaacaccctgaaaacctacgacctgcactgggtccgatctgtgcctggacaaggactgcagtggatgggctggattagccacgagggcgacaagaaagtgatcgtggaacggttcaaggccaaagtgaccatcgactgggacagaagcaccaacaccgcctacctgcagctgagcggactgacatctggcgataccgccgtgtactactgtgccaagggcagcaagcaccggctgagagattacgccctgtacgacgatgacggcgccctgaattgggccgtcgatgtggactacctgagcaacctggaattctggggccagggaacagccgtgacagtgtcttccggcggcggaggaagcggagggggaggctctggaggtggtggctctggtggcggaggctcaggcggtggcggatctgattttgtgctgacacagagccctcacagcctgagcgttacacctggcgagagcgccagcatcagctgcaagtctagccactctctgatccacggcgaccggaacaactacctggcttggtacgtgcagaagcccggcagatctcctcagctgctgatctacctggccagcagcagagctagcggcgtgccagatagattttctggcagcggcagcgacaaggatttcaccctgaagatctccagagtggaaaccgaggacgtgggcacctactactgtatgcagggcagagagagcccctggacatttggccagggcaccaaggtggacatcaaaggcggaggtggaagtggtggtggcggtagcggaggcggtgggtccggaggtggtggatctgaacctaagagcagcgacaagacccacacctgtcctccatgtcctgctccagaactgctcggcggaccttccgtgttcctgtttcctccaaagcctaaggacaccctgatgatcagcagaacccctgaagtgacctgcgtggtggtggatgtgtctcacgaggaccccgaagtgaagttcaattggtacgtggacggcgtggaagtgcacaacgccaagaccaagcctagagaggaacagtacaacagcacctacagagtggtgtccgtgctgacagtgctgcaccaggattggctgaacggcaaagagtacaagtgcaaggtgtccaacaaggccctgcctgctcctatcgagaaaaccatcagcaaggccaagggccagcctcgcgaacctcaagtctgtacactgcctcctagccgcgacgaactgaccaagaaccaggtgtccctgagctgcgccgtgaagggcttttacccttccgatatcgccgtggaatgggagagcaatggccagcctgagaacaactacaagacaacccctcctgtgctggacagcgacggctcattcttcctggtgtccaagctgacagtggacaagagcagatggcagcagggcaacgtgttcagctgcagcgtgctgcatgaagccctgcacagccactacacccagaagtccctgtctctgagccccggcaagtgataa

SEQ ID NO: 593 - DNA, 1653 bp, synthetic construct
  source 1..1653: mol_type = other DNA
atggattggatctggcgcatcctgtttctcgtgggagctgccacaggcgcccactctcaagttcacctgacacagtctggccccgaagtgcggaagcctggcacaagcgtgaaggtgtcctgtaaagcccctggcaacaccctgaaaacctacgacctgcactgggtccgatctgtgcctggacaaggactgcagtggatgggctggattagccacgagggcgacaagaaagtgatcgtggaacggttcaaggccaaagtgaccatcgactgggacagaagcaccaacaccgcctacctgcagctgagcggactgacatctggcgataccgccgtgtactactgtgccaagggcagcaagcaccggctgagagattacgccctgtacgacgatgacggcgccctgaattgggccgtcgatgtggactacctgagcaacctggaattctggggccagggaacagccgtgacagtgtcttccggcggcggaggaagcggagggggaggctctggaggtggtggctctggtggcggaggctcaggcggtggcggatctgattttgtgctgacacagagccctcacagcctgagcgttacacctggcgagagcgccagcatcagctgcaagtctagccactctctgatccacggcgaccggaacaactacctggcttggtacgtgcagaagcccggcagatctcctcagctgctgatctacctggccagcagcagagctagcggcgtgccagatagattttctggcagcggcagcgacaaggatttcaccctgaagatctccagagtggaaaccgaggacgtgggcacctactactgtatgcagggcagagagagcccctggacatttggccagggcaccaaggtggacatcaaaggcggaggtggaagtggtggtggcggtagcggaggcggtgggtccggaggtggtggatctgaacctaagagcagcgacaagacccacacctgtcctccatgtcctgctccagaactgctggccggaccttccgtgttcctgtttcctccaaagcctaaggacaccctgatgatcagcagaacccctgaagtgacctgcgtggtggtggatgtgtctcacgaggaccccgaagtgaagttcaattggtacgtggacggcgtggaagtgcacaatgccaagaccaagcctagagaggaacagtacaacagcacctacagagtggtgtccgtgctgaccgtgctgcaccaggattggctgaacggcaaagagtacaagtgcaaggtgtccaacaaggccctgcctctgcctgaggaaaagaccatcagcaaggccaagggccagcctcgcgaacctcaagtctgtacactgcctcctagccgcgacgaactgaccaagaaccaggtgtccctgagctgcgccgtgaagggcttttacccttccgatatcgccgtggaatgggagagcaatggccagcctgagaacaactacaagacaacccctcctgtgctggacagcgacggctcattcttcctggtgtccaagctgacagtggacaagagcagatggcagcagggcaacgtgttcagctgcagcgtgctgcatgaagccctgcacagccactacacccagaagtccctgtctctgagccccggcaagtgataa

SEQ ID NO: 594 - DNA, 1653 bp, synthetic construct
  source 1..1653: mol_type = other DNA
atggattggatctggcgcatcctgtttctcgtgggagctgccacaggcgcccactctcaagttcacctgacacagtctggccccgaagtgcggaagcctggcacaagcgtgaaggtgtcctgtaaagcccctggcaacaccctgaaaacctacgacctgcactgggtccgatctgtgcctggacaaggactgcagtggatgggctggattagccacgagggcgacaagaaagtgatcgtggaacggttcaaggccaaagtgaccatcgactgggacagaagcaccaacaccgcctacctgcagctgagcggactgacatctggcgataccgccgtgtactactgtgccaagggcagcaagcaccggctgagagattacgccctgtacgacgatgacggcgccctgaattgggccgtcgatgtggactacctgagcaacctggaattctggggccagggaacagccgtgacagtgtcttccggcggcggaggaagcggagggggaggctctggaggtggtggctctggtggcggaggctcaggcggtggcggatctgattttgtgctgacacagagccctcacagcctgagcgttacacctggcgagagcgccagcatcagctgcaagtctagccactctctgatccacggcgaccggaacaactacctggcttggtacgtgcagaagcccggcagatctcctcagctgctgatctacctggccagcagcagagctagcggcgtgccagatagattttctggcagcggcagcgacaaggatttcaccctgaagatctccagagtggaaaccgaggacgtgggcacctactactgtatgcagggcagagagagcccctggacatttggccagggcaccaaggtggacatcaaaggcggaggtggaagtggtggtggcggtagcggaggcggtgggtccggaggtggtggatctgaacctaagagcagcgacaagacccacacctgtcctccatgtcctgctccagaactgctggccggaccttccgtgttcctgtttcctccaaagcctaaggacaccctgatgatcagcagaacccctgaagtgacctgcgtggtggtggatgtgtctcacgaggaccctgaagtgaagttcaattggtacgtggacggcgtggaagtgcacaacgccaagaccaagcctagagaggaacagtacaacagcacctacagagtggtgtccgtgctgaccgtgctgcaccaggattggctgaacggcaaagagtacaagtgcaaggtgtccaacaaggccctgcctgcccctgaggaaaagaccatcagcaaggccaagggccagcctcgcgaacctcaagtctgtacactgcctcctagccgcgacgaactgaccaagaaccaggtgtccctgagctgcgccgtgaagggcttttacccttccgatatcgccgtggaatgggagagcaatggccagcctgagaacaactacaagacaacccctcctgtgctggacagcgacggctcattcttcctggtgtccaagctgacagtggacaagagcagatggcagcagggcaacgtgttcagctgcagcgtgctgcatgaagccctgcacagccactacacccagaagtccctgtctctgagccccggcaagtgataa

SEQ ID NO: 595 - DNA, 1653 bp, synthetic construct
  source 1..1653: mol_type = other DNA
atggattggatctggcgcatcctgtttctcgtgggagctgccacaggcgcccactctcaagttcacctgacacagtctggccccgaagtgcggaagcctggcacaagcgtgaaggtgtcctgtaaagcccctggcaacaccctgaaaacctacgacctgcactgggtccgatctgtgcctggacaaggactgcagtggatgggctggattagccacgagggcgacaagaaagtgatcgtggaacggttcaaggccaaagtgaccatcgactgggacagaagcaccaacaccgcctacctgcagctgagcggactgacatctggcgataccgccgtgtactactgtgccaagggcagcaagcaccggctgagagattacgccctgtacgacgatgacggcgccctgaattgggccgtcgatgtggactacctgagcaacctggaattctggggccagggaacagccgtgacagtgtcttccggcggcggaggaagcggagggggaggctctggaggtggtggctctggtggcggaggctcaggcggtggcggatctgattttgtgctgacacagagccctcacagcctgagcgttacacctggcgagagcgccagcatcagctgcaagtctagccactctctgatccacggcgaccggaacaactacctggcttggtacgtgcagaagcccggcagatctcctcagctgctgatctacctggccagcagcagagctagcggcgtgccagatagattttctggcagcggcagcgacaaggatttcaccctgaagatctccagagtggaaaccgaggacgtgggcacctactactgtatgcagggcagagagagcccctggacatttggccagggcaccaaggtggacatcaaaggcggaggtggaagtggtggtggcggtagcggaggcggtgggtccggaggtggtggatctgaacctaagagcagcgacaagacccacacctgtcctccatgtcctgctccagaactgctggccggaccttccgtgttcctgtttcctccaaagcctaaggacaccctgatgatcagcagaacccctgaagtgacctgcgtggtggtggatgtgtctcacgaggaccctgaagtgaagttcaattggtacgtggacggcgtggaagtgcacaacgccaagaccaagcctagagaggaacagtacaacagcacctacagagtggtgtccgtgctgaccgtgctgcaccaggattggctgaacggcaaagagtacaagtgcaaggtgtccaacaaggccctgcctgcccctatcgaaaagaccatcagcaaggccaagggccagcctcgcgaacctcaagtctgtacactgcctcctagccgcgacgaactgaccaagaaccaggtgtccctgagctgcgccgtgaagggcttttacccttccgatatcgccgtggaatgggagagcaatggccagcctgagaacaactacaagacaacccctcctgtgctggacagcgacggctcattcttcctggtgtccaagctgacagtggacaagagcagatggcagcagggcaacgtgttcagctgcagcgtgctgcatgaagccctgcacagccactacacccagaagtccctgtctctgagccccggcaagtgataa

SEQ ID NO: 596 - DNA, 1653 bp, synthetic construct
  source 1..1653: mol_type = other DNA
atggattggatctggcgcatcctgtttctcgtgggagctgccacaggcgcccactctcaagttcacctgacacagtctggccccgaagtgcggaagcctggcacaagcgtgaaggtgtcctgtaaagcccctggcaacaccctgaaaacctacgacctgcactgggtccgatctgtgcctggacaaggactgcagtggatgggctggattagccacgagggcgacaagaaagtgatcgtggaacggttcaaggccaaagtgaccatcgactgggacagaagcaccaacaccgcctacctgcagctgagcggactgacatctggcgataccgccgtgtactactgtgccaagggcagcaagcaccggctgagagattacgccctgtacgacgatgacggcgccctgaattgggccgtcgatgtggactacctgagcaacctggaattctggggccagggaacagccgtgacagtgtcttccggcggcggaggaagcggagggggaggctctggaggtggtggctctggtggcggaggctcaggcggtggcggatctgattttgtgctgacacagagccctcacagcctgagcgttacacctggcgagagcgccagcatcagctgcaagtctagccactctctgatccacggcgaccggaacaactacctggcttggtacgtgcagaagcccggcagatctcctcagctgctgatctacctggccagcagcagagctagcggcgtgccagatagattttctggcagcggcagcgacaaggatttcaccctgaagatctccagagtggaaaccgaggacgtgggcacctactactgtatgcagggcagagagagcccctggacatttggccagggcaccaaggtggacatcaaaggcggaggtggaagtggtggtggcggtagcggaggcggtgggtccggaggtggtggatctgaacctaagagcagcgacaagacccacacctgtcctccatgtcctgctccagaactgctgggcggaccttccgtgttcctgtttcctccaaagcctaaggacaccctgatgatcagcagaacccctgaagtgacctgcgtggtggtggatgtgtctcacgaggaccctgaagtgaagttcaattggtacgtggacggcgtggaagtgcacaacgccaagaccaagcctagagaggaacagtacaacagcacctacagagtggtgtccgtgctgaccgtgctgcaccaggattggctgaacggcaaagagtacaagtgcaaggtgtccaacaaggccctgcctgcccctgaggaaaagaccatcagcaaggccaagggccagcctcgcgaacctcaagtctgtacactgcctcctagccgcgacgaactgaccaagaaccaggtgtccctgagctgcgccgtgaagggcttttacccttccgatatcgccgtggaatgggagagcaatggccagcctgagaacaactacaagacaacccctcctgtgctggacagcgacggctcattcttcctggtgtccaagctgacagtggacaagagcagatggcagcagggcaacgtgttcagctgcagcgtgctgcatgaagccctgcacagccactacacccagaagtccctgtctctgagccccggcaagtgataa

SEQ ID NO: 597 - DNA, 1653 bp, synthetic construct
  source 1..1653: mol_type = other DNA
atggattggatctggcgcatcctgtttctcgtgggagctgccacaggcgcccactctcaagttcacctgacacagtctggccccgaagtgcggaagcctggcacaagcgtgaaggtgtcctgtaaagcccctggcaacaccctgaaaacctacgacctgcactgggtccgatctgtgcctggacaaggactgcagtggatgggctggattagccacgagggcgacaagaaagtgatcgtggaacggttcaaggccaaagtgaccatcgactgggacagaagcaccaacaccgcctacctgcagctgagcggactgacatctggcgataccgccgtgtactactgtgccaagggcagcaagcaccggctgagagattacgccctgtacgacgatgacggcgccctgaattgggccgtcgatgtggactacctgagcaacctggaattctggggccagggaacagccgtgacagtgtcttccggcggcggaggaagcggagggggaggctctggaggtggtggctctggtggcggaggctcaggcggtggcggatctgattttgtgctgacacagagccctcacagcctgagcgttacacctggcgagagcgccagcatcagctgcaagtctagccactctctgatccacggcgaccggaacaactacctggcttggtacgtgcagaagcccggcagatctcctcagctgctgatctacctggccagcagcagagctagcggcgtgccagatagattttctggcagcggcagcgacaaggatttcaccctgaagatctccagagtggaaaccgaggacgtgggcacctactactgtatgcagggcagagagagcccctggacatttggccagggcaccaaggtggacatcaaaggcggaggtggaagtggtggtggcggtagcggaggcggtgggtccggaggtggtggatctgaacctaagagcagcgacaagacccacacctgtcctccatgtcctgctccagaactgctcggcggaccttccgtgttcctgtttcctccaaagcctaaggacaccctgatgatcagcagaacccctgaagtgacctgcgtggtggtggatgtgtctcacgaggaccccgaagtgaagttcaattggtacgtggacggcgtggaagtgcacaacgccaagaccaagcctagagaggaacagtacaacagcacctacagagtggtgtccgtgctgacagtgctgcaccaggattggctgaacggcaaagagtacaagtgcaaggtgtccaacaaggccctgcctgctcctatcgagaaaaccatcagcaaggccaagggccagcctagggaaccccaggtttacaccctgcctccatgccgcgacgaactgaccaagaaccaggtgtccctgtggtgcctggtcaagggcttctacccttccgatatcgccgtggaatgggagagcaatggccagcctgagaacaactacaagacaacccctcctgtgctggacagcgacggctcattcttcctgtacagcaagctgacagtggacaagagcagatggcagcagggcaacgtgttcagctgcagcgtgctgcatgaagccctgcacagccactacacccagaagtccctgtctctgagccccggcaagtgataa

SEQ ID NO: 598 - DNA, 1653 bp, synthetic construct
  source 1..1653: mol_type = other DNA
atggattggatctggcgcatcctgtttctcgtgggagctgccacaggcgcccactctcaagttcacctgacacagtctggccccgaagtgcggaagcctggcacaagcgtgaaggtgtcctgtaaagcccctggcaacaccctgaaaacctacgacctgcactgggtccgatctgtgcctggacaaggactgcagtggatgggctggattagccacgagggcgacaagaaagtgatcgtggaacggttcaaggccaaagtgaccatcgactgggacagaagcaccaacaccgcctacctgcagctgagcggactgacatctggcgataccgccgtgtactactgtgccaagggcagcaagcaccggctgagagattacgccctgtacgacgatgacggcgccctgaattgggccgtcgatgtggactacctgagcaacctggaattctggggccagggaacagccgtgacagtgtcttccggcggcggaggaagcggagggggaggctctggaggtggtggctctggtggcggaggctcaggcggtggcggatctgattttgtgctgacacagagccctcacagcctgagcgttacacctggcgagagcgccagcatcagctgcaagtctagccactctctgatccacggcgaccggaacaactacctggcttggtacgtgcagaagcccggcagatctcctcagctgctgatctacctggccagcagcagagctagcggcgtgccagatagattttctggcagcggcagcgacaaggatttcaccctgaagatctccagagtggaaaccgaggacgtgggcacctactactgtatgcagggcagagagagcccctggacatttggccagggcaccaaggtggacatcaaaggcggaggtggaagtggtggtggcggtagcggaggcggtgggtccggaggtggtggatctgaacctaagagcagcgacaagacccacacctgtcctccatgtcctgctccagaactgctggccggaccttccgtgttcctgtttcctccaaagcctaaggacaccctgatgatcagcagaacccctgaagtgacctgcgtggtggtggatgtgtctcacgaggaccccgaagtgaagttcaattggtacgtggacggcgtggaagtgcacaatgccaagaccaagcctagagaggaacagtacaacagcacctacagagtggtgtccgtgctgaccgtgctgcaccaggattggctgaacggcaaagagtacaagtgcaaggtgtccaacaaggccctgcctctgcctgaggaaaagaccatcagcaaggccaagggccagcctagggaaccccaggtttacaccctgcctccatgccgcgacgaactgaccaagaaccaggtgtccctgtggtgcctggtcaagggcttctacccttccgatatcgccgtggaatgggagagcaatggccagcctgagaacaactacaagacaacccctcctgtgctggacagcgacggctcattcttcctgtacagcaagctgacagtggacaagagcagatggcagcagggcaacgtgttcagctgcagcgtgctgcatgaagccctgcacagccactacacccagaagtccctgtctctgagccccggcaagtgataa

SEQ ID NO: 599 - DNA, 1653 bp, synthetic construct
  source 1..1653: mol_type = other DNA
atggattggatctggcgcatcctgtttctcgtgggagctgccacaggcgcccactctcaagttcacctgacacagtctggccccgaagtgcggaagcctggcacaagcgtgaaggtgtcctgtaaagcccctggcaacaccctgaaaacctacgacctgcactgggtccgatctgtgcctggacaaggactgcagtggatgggctggattagccacgagggcgacaagaaagtgatcgtggaacggttcaaggccaaagtgaccatcgactgggacagaagcaccaacaccgcctacctgcagctgagcggactgacatctggcgataccgccgtgtactactgtgccaagggcagcaagcaccggctgagagattacgccctgtacgacgatgacggcgccctgaattgggccgtcgatgtggactacctgagcaacctggaattctggggccagggaacagccgtgacagtgtcttccggcggcggaggaagcggagggggaggctctggaggtggtggctctggtggcggaggctcaggcggtggcggatctgattttgtgctgacacagagccctcacagcctgagcgttacacctggcgagagcgccagcatcagctgcaagtctagccactctctgatccacggcgaccggaacaactacctggcttggtacgtgcagaagcccggcagatctcctcagctgctgatctacctggccagcagcagagctagcggcgtgccagatagattttctggcagcggcagcgacaaggatttcaccctgaagatctccagagtggaaaccgaggacgtgggcacctactactgtatgcagggcagagagagcccctggacatttggccagggcaccaaggtggacatcaaaggcggaggtggaagtggtggtggcggtagcggaggcggtgggtccggaggtggtggatctgaacctaagagcagcgacaagacccacacctgtcctccatgtcctgctccagaactgctggccggaccttccgtgttcctgtttcctccaaagcctaaggacaccctgatgatcagcagaacccctgaagtgacctgcgtggtggtggatgtgtctcacgaggaccctgaagtgaagttcaattggtacgtggacggcgtggaagtgcacaacgccaagaccaagcctagagaggaacagtacaacagcacctacagagtggtgtccgtgctgaccgtgctgcaccaggattggctgaacggcaaagagtacaagtgcaaggtgtccaacaaggccctgcctgcccctgaggaaaagaccatcagcaaggccaagggccagcctagggaaccccaggtttacaccctgcctccatgccgcgacgaactgaccaagaaccaggtgtccctgtggtgcctggtcaagggcttctacccttccgatatcgccgtggaatgggagagcaatggccagcctgagaacaactacaagacaacccctcctgtgctggacagcgacggctcattcttcctgtacagcaagctgacagtggacaagagcagatggcagcagggcaacgtgttcagctgcagcgtgctgcatgaagccctgcacagccactacacccagaagtccctgtctctgagccccggcaagtgataa

SEQ ID NO: 600 - DNA, 1653 bp, synthetic construct
  source 1..1653: mol_type = other DNA
atggattggatctggcgcatcctgtttctcgtgggagctgccacaggcgcccactctcaagttcacctgacacagtctggccccgaagtgcggaagcctggcacaagcgtgaaggtgtcctgtaaagcccctggcaacaccctgaaaacctacgacctgcactgggtccgatctgtgcctggacaaggactgcagtggatgggctggattagccacgagggcgacaagaaagtgatcgtggaacggttcaaggccaaagtgaccatcgactgggacagaagcaccaacaccgcctacctgcagctgagcggactgacatctggcgataccgccgtgtactactgtgccaagggcagcaagcaccggctgagagattacgccctgtacgacgatgacggcgccctgaattgggccgtcgatgtggactacctgagcaacctggaattctggggccagggaacagccgtgacagtgtcttccggcggcggaggaagcggagggggaggctctggaggtggtggctctggtggcggaggctcaggcggtggcggatctgattttgtgctgacacagagccctcacagcctgagcgttacacctggcgagagcgccagcatcagctgcaagtctagccactctctgatccacggcgaccggaacaactacctggcttggtacgtgcagaagcccggcagatctcctcagctgctgatctacctggccagcagcagagctagcggcgtgccagatagattttctggcagcggcagcgacaaggatttcaccctgaagatctccagagtggaaaccgaggacgtgggcacctactactgtatgcagggcagagagagcccctggacatttggccagggcaccaaggtggacatcaaaggcggaggtggaagtggtggtggcggtagcggaggcggtgggtccggaggtggtggatctgaacctaagagcagcgacaagacccacacctgtcctccatgtcctgctccagaactgctggccggaccttccgtgttcctgtttcctccaaagcctaaggacaccctgatgatcagcagaacccctgaagtgacctgcgtggtggtggatgtgtctcacgaggaccctgaagtgaagttcaattggtacgtggacggcgtggaagtgcacaacgccaagaccaagcctagagaggaacagtacaacagcacctacagagtggtgtccgtgctgaccgtgctgcaccaggattggctgaacggcaaagagtacaagtgcaaggtgtccaacaaggccctgcctgcccctatcgaaaagaccatcagcaaggccaagggccagcctagggaaccccaggtttacaccctgcctccatgccgcgacgaactgaccaagaaccaggtgtccctgtggtgcctggtcaagggcttctacccttccgatatcgccgtggaatgggagagcaatggccagcctgagaacaactacaagacaacccctcctgtgctggacagcgacggctcattcttcctgtacagcaagctgacagtggacaagagcagatggcagcagggcaacgtgttcagctgcagcgtgctgcatgaagccctgcacagccactacacccagaagtccctgtctctgagccccggcaagtgataa

SEQ ID NO: 601 - DNA, 1653 bp, synthetic construct
  source 1..1653: mol_type = other DNA
atggattggatctggcgcatcctgtttctcgtgggagctgccacaggcgcccactctcaagttcacctgacacagtctggccccgaagtgcggaagcctggcacaagcgtgaaggtgtcctgtaaagcccctggcaacaccctgaaaacctacgacctgcactgggtccgatctgtgcctggacaaggactgcagtggatgggctggattagccacgagggcgacaagaaagtgatcgtggaacggttcaaggccaaagtgaccatcgactgggacagaagcaccaacaccgcctacctgcagctgagcggactgacatctggcgataccgccgtgtactactgtgccaagggcagcaagcaccggctgagagattacgccctgtacgacgatgacggcgccctgaattgggccgtcgatgtggactacctgagcaacctggaattctggggccagggaacagccgtgacagtgtcttccggcggcggaggaagcggagggggaggctctggaggtggtggctctggtggcggaggctcaggcggtggcggatctgattttgtgctgacacagagccctcacagcctgagcgttacacctggcgagagcgccagcatcagctgcaagtctagccactctctgatccacggcgaccggaacaactacctggcttggtacgtgcagaagcccggcagatctcctcagctgctgatctacctggccagcagcagagctagcggcgtgccagatagattttctggcagcggcagcgacaaggatttcaccctgaagatctccagagtggaaaccgaggacgtgggcacctactactgtatgcagggcagagagagcccctggacatttggccagggcaccaaggtggacatcaaaggcggaggtggaagtggtggtggcggtagcggaggcggtgggtccggaggtggtggatctgaacctaagagcagcgacaagacccacacctgtcctccatgtcctgctccagaactgctgggcggaccttccgtgttcctgtttcctccaaagcctaaggacaccctgatgatcagcagaacccctgaagtgacctgcgtggtggtggatgtgtctcacgaggaccctgaagtgaagttcaattggtacgtggacggcgtggaagtgcacaacgccaagaccaagcctagagaggaacagtacaacagcacctacagagtggtgtccgtgctgaccgtgctgcaccaggattggctgaacggcaaagagtacaagtgcaaggtgtccaacaaggccctgcctgcccctgaggaaaagaccatcagcaaggccaagggccagcctagggaaccccaggtttacaccctgcctccatgccgcgacgaactgaccaagaaccaggtgtccctgtggtgcctggtcaagggcttctacccttccgatatcgccgtggaatgggagagcaatggccagcctgagaacaactacaagacaacccctcctgtgctggacagcgacggctcattcttcctgtacagcaagctgacagtggacaagagcagatggcagcagggcaacgtgttcagctgcagcgtgctgcatgaagccctgcacagccactacacccagaagtccctgtctctgagccccggcaagtgataa

SEQ ID NO: 602 - DNA, 1653 bp, synthetic construct
  source 1..1653: mol_type = other DNA
atggattggatctggcgcatcctgtttctcgtgggagctgccacaggcgcccacagcgattttgtgctgacacagtctccccacagcctgagcgttacacctggcgagtctgccagcatcagctgcaagtctagccactctctgatccacggcgaccggaacaactacctggcttggtacgtgcagaagcccggcagatctcctcagctgctgatctacctggccagcagcagagcttctggcgtgcccgatagattttctggcagcggcagcgacaaggacttcaccctgaagatctccagagtggaaaccgaggacgtgggcacctactactgtatgcagggcagagagagcccctggacatttggccagggcaccaaggtggacatcaaaggcggcggaggaagcggaggcggaggttctggtggtggtggctctggtggcggaggctcaggcggtggcggatctcaagttcatctgacacagagcggccctgaagtgcggaagcctggcacaagcgtgaaggtgtcctgtaaagcccctggcaacaccctgaaaacctacgacctgcactgggtccgatctgtgcctggacagggactgcaatggatgggctggattagccacgagggcgacaagaaagtgatcgtggaacggttcaaggccaaagtgaccatcgactgggacagaagcaccaacaccgcctacctgcagctgagcggactgacatctggcgataccgccgtgtactactgtgccaagggcagcaagcaccggctgagagattacgccctgtacgacgatgacggcgccctgaattgggccgtcgatgtggactacctgagcaacctggaattctggggccagggaacagccgtgacagtgtcttccggcggaggtggaagtggtggcggcggatctggcggcggtgggtccggaggtggtggatctgaacctaagagcagcgacaagacccacacctgtcctccatgtcctgctccagaactgctcggcggaccttccgtgttcctgtttcctccaaagcctaaggacaccctgatgatcagcagaacccctgaagtgacctgcgtggtggtggatgtgtctcacgaggaccccgaagtgaagttcaattggtacgtggacggcgtggaagtgcacaacgccaagaccaagcctagagaggaacagtacaacagcacctacagagtggtgtccgtgctgacagtgctgcaccaggattggctgaacggcaaagagtacaagtgcaaggtgtccaacaaggccctgcctgctcctatcgagaaaaccatcagcaaggccaagggccagcctagggaaccccaggtttacacactgcctccaagccgcgaggaaatgaccaagaaccaggtgtccctgacctgcctcgtgaagggcttctacccttccgatatcgccgtggaatgggagagcaatggccagcctgagaacaactacaagacaacccctcctgtgctggacagcgacggctcattcttcctgtacagcaagctgactgtggataagtcccggtggcagcagggcaacgtgttcagctgttctgtgatgcacgaagccctgcacaaccactacacccagaaaagcctgtctctgagccccggcaagtgataa

SEQ ID NO: 603 - DNA, 1653 bp, synthetic construct
  source 1..1653: mol_type = other DNA
atggattggatctggcgcatcctgtttctcgtgggagctgccacaggcgcccacagcgattttgtgctgacacagtctccccacagcctgagcgttacacctggcgagtctgccagcatcagctgcaagtctagccactctctgatccacggcgaccggaacaactacctggcttggtacgtgcagaagcccggcagatctcctcagctgctgatctacctggccagcagcagagcttctggcgtgcccgatagattttctggcagcggcagcgacaaggacttcaccctgaagatctccagagtggaaaccgaggacgtgggcacctactactgtatgcagggcagagagagcccctggacatttggccagggcaccaaggtggacatcaaaggcggcggaggaagcggaggcggaggttctggtggtggtggctctggtggcggaggctcaggcggtggcggatctcaagttcatctgacacagagcggccctgaagtgcggaagcctggcacaagcgtgaaggtgtcctgtaaagcccctggcaacaccctgaaaacctacgacctgcactgggtccgatctgtgcctggacagggactgcaatggatgggctggattagccacgagggcgacaagaaagtgatcgtggaacggttcaaggccaaagtgaccatcgactgggacagaagcaccaacaccgcctacctgcagctgagcggactgacatctggcgataccgccgtgtactactgtgccaagggcagcaagcaccggctgagagattacgccctgtacgacgatgacggcgccctgaattgggccgtcgatgtggactacctgagcaacctggaattctggggccagggaacagccgtgacagtgtcttccggcggaggtggaagtggtggcggcggatctggcggcggtgggtccggaggtggtggatctgaacctaagagcagcgacaagacccacacctgtcctccatgtcctgctccagaactgctcggcggaccttccgtgttcctgtttcctccaaagcctaaggacaccctgatgatcagcagaacccctgaagtgacctgcgtggtggtggatgtgtctcacgaggaccccgaagtgaagttcaattggtacgtggacggcgtggaagtgcacaacgccaagaccaagcctagagaggaacagtacaacagcacctacagagtggtgtccgtgctgacagtgctgcaccaggattggctgaacggcaaagagtacaagtgcaaggtgtccaacaaggccctgcctgctcctatcgagaaaaccatcagcaaggccaagggccagcctagggaaccccaggtttacacactgcctccaagccgcgaggaaatgaccaagaaccaggtgtccctgacctgcctcgtgaagggcttctacccttccgatatcgccgtggaatgggagagcaatggccagcctgagaacaactacaagacaacccctcctgtgctggacagcgacggctcattcttcctgtacagcaagctgaccgtggacaagtccagatggcagcagggcaacgtgttcagctgtagcgtgctgcacgaagccctgcacagccactacacccagaaaagcctgtctctgagccccggcaaatgataa

SEQ ID NO: 604 - DNA, 1653 bp, synthetic construct
  source 1..1653: mol_type = other DNA
atggattggatctggcgcatcctgtttctcgtgggagctgccacaggcgcccacagcgattttgtgctgacacagtctccccacagcctgagcgttacacctggcgagtctgccagcatcagctgcaagtctagccactctctgatccacggcgaccggaacaactacctggcttggtacgtgcagaagcccggcagatctcctcagctgctgatctacctggccagcagcagagcttctggcgtgcccgatagattttctggcagcggcagcgacaaggacttcaccctgaagatctccagagtggaaaccgaggacgtgggcacctactactgtatgcagggcagagagagcccctggacatttggccagggcaccaaggtggacatcaaaggcggcggaggaagcggaggcggaggttctggtggtggtggctctggtggcggaggctcaggcggtggcggatctcaagttcatctgacacagagcggccctgaagtgcggaagcctggcacaagcgtgaaggtgtcctgtaaagcccctggcaacaccctgaaaacctacgacctgcactgggtccgatctgtgcctggacagggactgcaatggatgggctggattagccacgagggcgacaagaaagtgatcgtggaacggttcaaggccaaagtgaccatcgactgggacagaagcaccaacaccgcctacctgcagctgagcggactgacatctggcgataccgccgtgtactactgtgccaagggcagcaagcaccggctgagagattacgccctgtacgacgatgacggcgccctgaattgggccgtcgatgtggactacctgagcaacctggaattctggggccagggaacagccgtgacagtgtcttccggcggaggtggaagtggtggcggcggatctggcggcggtgggtccggaggtggtggatctgaacctaagagcagcgacaagacccacacctgtcctccatgtcctgctccagaactgctggccggaccttccgtgttcctgtttcctccaaagcctaaggacaccctgatgatcagcagaacccctgaagtgacctgcgtggtggtggatgtgtctcacgaggaccccgaagtgaagttcaattggtacgtggacggcgtggaagtgcacaatgccaagaccaagcctagagaggaacagtacaacagcacctacagagtggtgtccgtgctgaccgtgctgcaccaggattggctgaacggcaaagagtacaagtgcaaggtgtccaacaaggccctgcctctgcctgaggaaaagaccatcagcaaggccaagggccagcctagggaaccccaggtttacacactgcctccaagccgcgaggaaatgaccaagaaccaggtgtccctgacctgcctcgtgaagggcttctacccttccgatatcgccgtggaatgggagagcaatggccagcctgagaacaactacaagacaacccctcctgtgctggacagcgacggctcattcttcctgtacagcaagctgaccgtggacaagtccagatggcagcagggcaacgtgttcagctgtagcgtgctgcacgaagccctgcacagccactacacccagaaaagcctgtctctgagccccggcaaatgataa

SEQ ID NO: 605 - DNA, 1653 bp, synthetic construct
  source 1..1653: mol_type = other DNA
atggattggatctggcgcatcctgtttctcgtgggagctgccacaggcgcccacagcgattttgtgctgacacagtctccccacagcctgagcgttacacctggcgagtctgccagcatcagctgcaagtctagccactctctgatccacggcgaccggaacaactacctggcttggtacgtgcagaagcccggcagatctcctcagctgctgatctacctggccagcagcagagcttctggcgtgcccgatagattttctggcagcggcagcgacaaggacttcaccctgaagatctccagagtggaaaccgaggacgtgggcacctactactgtatgcagggcagagagagcccctggacatttggccagggcaccaaggtggacatcaaaggcggcggaggaagcggaggcggaggttctggtggtggtggctctggtggcggaggctcaggcggtggcggatctcaagttcatctgacacagagcggccctgaagtgcggaagcctggcacaagcgtgaaggtgtcctgtaaagcccctggcaacaccctgaaaacctacgacctgcactgggtccgatctgtgcctggacagggactgcaatggatgggctggattagccacgagggcgacaagaaagtgatcgtggaacggttcaaggccaaagtgaccatcgactgggacagaagcaccaacaccgcctacctgcagctgagcggactgacatctggcgataccgccgtgtactactgtgccaagggcagcaagcaccggctgagagattacgccctgtacgacgatgacggcgccctgaattgggccgtcgatgtggactacctgagcaacctggaattctggggccagggaacagccgtgacagtgtcttccggcggaggtggaagtggtggcggcggatctggcggcggtgggtccggaggtggtggatctgaacctaagagcagcgacaagacccacacctgtcctccatgtcctgctccagaactgctggccggaccttccgtgttcctgtttcctccaaagcctaaggacaccctgatgatcagcagaacccctgaagtgacctgcgtggtggtggatgtgtctcacgaggaccctgaagtgaagttcaattggtacgtggacggcgtggaagtgcacaacgccaagaccaagcctagagaggaacagtacaacagcacctacagagtggtgtccgtgctgaccgtgctgcaccaggattggctgaacggcaaagagtacaagtgcaaggtgtccaacaaggccctgcctgcccctgaggaaaagaccatcagcaaggccaagggccagcctagggaaccccaggtttacacactgcctccaagccgcgaggaaatgaccaagaaccaggtgtccctgacctgcctcgtgaagggcttctacccttccgatatcgccgtggaatgggagagcaatggccagcctgagaacaactacaagacaacccctcctgtgctggacagcgacggctcattcttcctgtacagcaagctgaccgtggacaagtccagatggcagcagggcaacgtgttcagctgtagcgtgctgcacgaagccctgcacagccactacacccagaaaagcctgtctctgagccccggcaaatgataa

SEQ ID NO: 606 - DNA, 1653 bp, synthetic construct
  source 1..1653: mol_type = other DNA
atggattggatctggcgcatcctgtttctcgtgggagctgccacaggcgcccacagcgattttgtgctgacacagtctccccacagcctgagcgttacacctggcgagtctgccagcatcagctgcaagtctagccactctctgatccacggcgaccggaacaactacctggcttggtacgtgcagaagcccggcagatctcctcagctgctgatctacctggccagcagcagagcttctggcgtgcccgatagattttctggcagcggcagcgacaaggacttcaccctgaagatctccagagtggaaaccgaggacgtgggcacctactactgtatgcagggcagagagagcccctggacatttggccagggcaccaaggtggacatcaaaggcggcggaggaagcggaggcggaggttctggtggtggtggctctggtggcggaggctcaggcggtggcggatctcaagttcatctgacacagagcggccctgaagtgcggaagcctggcacaagcgtgaaggtgtcctgtaaagcccctggcaacaccctgaaaacctacgacctgcactgggtccgatctgtgcctggacagggactgcaatggatgggctggattagccacgagggcgacaagaaagtgatcgtggaacggttcaaggccaaagtgaccatcgactgggacagaagcaccaacaccgcctacctgcagctgagcggactgacatctggcgataccgccgtgtactactgtgccaagggcagcaagcaccggctgagagattacgccctgtacgacgatgacggcgccctgaattgggccgtcgatgtggactacctgagcaacctggaattctggggccagggaacagccgtgacagtgtcttccggcggaggtggaagtggtggcggcggatctggcggcggtgggtccggaggtggtggatctgaacctaagagcagcgacaagacccacacctgtcctccatgtcctgctccagaactgctggccggaccttccgtgttcctgtttcctccaaagcctaaggacaccctgatgatcagcagaacccctgaagtgacctgcgtggtggtggatgtgtctcacgaggaccctgaagtgaagttcaattggtacgtggacggcgtggaagtgcacaacgccaagaccaagcctagagaggaacagtacaacagcacctacagagtggtgtccgtgctgaccgtgctgcaccaggattggctgaacggcaaagagtacaagtgcaaggtgtccaacaaggccctgcctgcccctatcgaaaagaccatcagcaaggccaagggccagcctagggaaccccaggtttacacactgcctccaagccgcgaggaaatgaccaagaaccaggtgtccctgacctgcctcgtgaagggcttctacccttccgatatcgccgtggaatgggagagcaatggccagcctgagaacaactacaagacaacccctcctgtgctggacagcgacggctcattcttcctgtacagcaagctgaccgtggacaagtccagatggcagcagggcaacgtgttcagctgtagcgtgctgcacgaagccctgcacagccactacacccagaaaagcctgtctctgagccccggcaaatgataa

SEQ ID NO: 607 - DNA, 1653 bp, synthetic construct
  source 1..1653: mol_type = other DNA
atggattggatctggcgcatcctgtttctcgtgggagctgccacaggcgcccacagcgattttgtgctgacacagtctccccacagcctgagcgttacacctggcgagtctgccagcatcagctgcaagtctagccactctctgatccacggcgaccggaacaactacctggcttggtacgtgcagaagcccggcagatctcctcagctgctgatctacctggccagcagcagagcttctggcgtgcccgatagattttctggcagcggcagcgacaaggacttcaccctgaagatctccagagtggaaaccgaggacgtgggcacctactactgtatgcagggcagagagagcccctggacatttggccagggcaccaaggtggacatcaaaggcggcggaggaagcggaggcggaggttctggtggtggtggctctggtggcggaggctcaggcggtggcggatctcaagttcatctgacacagagcggccctgaagtgcggaagcctggcacaagcgtgaaggtgtcctgtaaagcccctggcaacaccctgaaaacctacgacctgcactgggtccgatctgtgcctggacagggactgcaatggatgggctggattagccacgagggcgacaagaaagtgatcgtggaacggttcaaggccaaagtgaccatcgactgggacagaagcaccaacaccgcctacctgcagctgagcggactgacatctggcgataccgccgtgtactactgtgccaagggcagcaagcaccggctgagagattacgccctgtacgacgatgacggcgccctgaattgggccgtcgatgtggactacctgagcaacctggaattctggggccagggaacagccgtgacagtgtcttccggcggaggtggaagtggtggcggcggatctggcggcggtgggtccggaggtggtggatctgaacctaagagcagcgacaagacccacacctgtcctccatgtcctgctccagaactgctgggcggaccttccgtgttcctgtttcctccaaagcctaaggacaccctgatgatcagcagaacccctgaagtgacctgcgtggtggtggatgtgtctcacgaggaccctgaagtgaagttcaattggtacgtggacggcgtggaagtgcacaacgccaagaccaagcctagagaggaacagtacaacagcacctacagagtggtgtccgtgctgaccgtgctgcaccaggattggctgaacggcaaagagtacaagtgcaaggtgtccaacaaggccctgcctgcccctgaggaaaagaccatcagcaaggccaagggccagcctagggaaccccaggtttacacactgcctccaagccgcgaggaaatgaccaagaaccaggtgtccctgacctgcctcgtgaagggcttctacccttccgatatcgccgtggaatgggagagcaatggccagcctgagaacaactacaagacaacccctcctgtgctggacagcgacggctcattcttcctgtacagcaagctgaccgtggacaagtccagatggcagcagggcaacgtgttcagctgtagcgtgctgcacgaagccctgcacagccactacacccagaaaagcctgtctctgagccccggcaaatgataa

SEQ ID NO: 608 - DNA, 1653 bp, synthetic construct
  source 1..1653: mol_type = other DNA
atggattggatctggcgcatcctgtttctcgtgggagctgccacaggcgcccacagcgattttgtgctgacacagtctccccacagcctgagcgttacacctggcgagtctgccagcatcagctgcaagtctagccactctctgatccacggcgaccggaacaactacctggcttggtacgtgcagaagcccggcagatctcctcagctgctgatctacctggccagcagcagagcttctggcgtgcccgatagattttctggcagcggcagcgacaaggacttcaccctgaagatctccagagtggaaaccgaggacgtgggcacctactactgtatgcagggcagagagagcccctggacatttggccagggcaccaaggtggacatcaaaggcggcggaggaagcggaggcggaggttctggtggtggtggctctggtggcggaggctcaggcggtggcggatctcaagttcatctgacacagagcggccctgaagtgcggaagcctggcacaagcgtgaaggtgtcctgtaaagcccctggcaacaccctgaaaacctacgacctgcactgggtccgatctgtgcctggacagggactgcaatggatgggctggattagccacgagggcgacaagaaagtgatcgtggaacggttcaaggccaaagtgaccatcgactgggacagaagcaccaacaccgcctacctgcagctgagcggactgacatctggcgataccgccgtgtactactgtgccaagggcagcaagcaccggctgagagattacgccctgtacgacgatgacggcgccctgaattgggccgtcgatgtggactacctgagcaacctggaattctggggccagggaacagccgtgacagtgtcttccggcggaggtggaagtggtggcggcggatctggcggcggtgggtccggaggtggtggatctgaacctaagagcagcgacaagacccacacctgtcctccatgtcctgctccagaactgctcggcggaccttccgtgttcctgtttcctccaaagcctaaggacaccctgatgatcagcagaacccctgaagtgacctgcgtggtggtggatgtgtctcacgaggaccccgaagtgaagttcaattggtacgtggacggcgtggaagtgcacaacgccaagaccaagcctagagaggaacagtacaacagcacctacagagtggtgtccgtgctgacagtgctgcaccaggattggctgaacggcaaagagtacaagtgcaaggtgtccaacaaggccctgcctgctcctatcgagaaaaccatcagcaaggccaagggccagcctagggaaccccaagtctgtacactgcctcctagccgcgaggaaatgaccaagaaccaggtgtccctgagctgcgccgtgaagggcttttacccttccgatatcgccgtggaatgggagagcaatggccagcctgagaacaactacaagacaacccctcctgtgctggacagcgacggctcattcttcctggtgtccaagctgacagtggacaagagcagatggcagcagggcaacgtgttcagctgctctgtgctgcacgaagccctgcacagccactacacccagaagtccctgtctctgagccccggcaagtgataa

SEQ ID NO: 609 - DNA, 1653 bp, synthetic construct
  source 1..1653: mol_type = other DNA
atggattggatctggcgcatcctgtttctcgtgggagctgccacaggcgcccacagcgattttgtgctgacacagtctccccacagcctgagcgttacacctggcgagtctgccagcatcagctgcaagtctagccactctctgatccacggcgaccggaacaactacctggcttggtacgtgcagaagcccggcagatctcctcagctgctgatctacctggccagcagcagagcttctggcgtgcccgatagattttctggcagcggcagcgacaaggacttcaccctgaagatctccagagtggaaaccgaggacgtgggcacctactactgtatgcagggcagagagagcccctggacatttggccagggcaccaaggtggacatcaaaggcggcggaggaagcggaggcggaggttctggtggtggtggctctggtggcggaggctcaggcggtggcggatctcaagttcatctgacacagagcggccctgaagtgcggaagcctggcacaagcgtgaaggtgtcctgtaaagcccctggcaacaccctgaaaacctacgacctgcactgggtccgatctgtgcctggacagggactgcaatggatgggctggattagccacgagggcgacaagaaagtgatcgtggaacggttcaaggccaaagtgaccatcgactgggacagaagcaccaacaccgcctacctgcagctgagcggactgacatctggcgataccgccgtgtactactgtgccaagggcagcaagcaccggctgagagattacgccctgtacgacgatgacggcgccctgaattgggccgtcgatgtggactacctgagcaacctggaattctggggccagggaacagccgtgacagtgtcttccggcggaggtggaagtggtggcggcggatctggcggcggtgggtccggaggtggtggatctgaacctaagagcagcgacaagacccacacctgtcctccatgtcctgctccagaactgctggccggaccttccgtgttcctgtttcctccaaagcctaaggacaccctgatgatcagcagaacccctgaagtgacctgcgtggtggtggatgtgtctcacgaggaccccgaagtgaagttcaattggtacgtggacggcgtggaagtgcacaatgccaagaccaagcctagagaggaacagtacaacagcacctacagagtggtgtccgtgctgaccgtgctgcaccaggattggctgaacggcaaagagtacaagtgcaaggtgtccaacaaggccctgcctctgcctgaggaaaagaccatcagcaaggccaagggccagcctagggaaccccaagtctgtacactgcctcctagccgcgaggaaatgaccaagaaccaggtgtccctgagctgcgccgtgaagggcttttacccttccgatatcgccgtggaatgggagagcaatggccagcctgagaacaactacaagacaacccctcctgtgctggacagcgacggctcattcttcctggtgtccaagctgacagtggacaagagcagatggcagcagggcaacgtgttcagctgctctgtgctgcacgaagccctgcacagccactacacccagaagtccctgtctctgagccccggcaagtgataa

SEQ ID NO: 610 - DNA, 1653 bp, synthetic construct
  source 1..1653: mol_type = other DNA
atggattggatctggcgcatcctgtttctcgtgggagctgccacaggcgcccacagcgattttgtgctgacacagtctccccacagcctgagcgttacacctggcgagtctgccagcatcagctgcaagtctagccactctctgatccacggcgaccggaacaactacctggcttggtacgtgcagaagcccggcagatctcctcagctgctgatctacctggccagcagcagagcttctggcgtgcccgatagattttctggcagcggcagcgacaaggacttcaccctgaagatctccagagtggaaaccgaggacgtgggcacctactactgtatgcagggcagagagagcccctggacatttggccagggcaccaaggtggacatcaaaggcggcggaggaagcggaggcggaggttctggtggtggtggctctggtggcggaggctcaggcggtggcggatctcaagttcatctgacacagagcggccctgaagtgcggaagcctggcacaagcgtgaaggtgtcctgtaaagcccctggcaacaccctgaaaacctacgacctgcactgggtccgatctgtgcctggacagggactgcaatggatgggctggattagccacgagggcgacaagaaagtgatcgtggaacggttcaaggccaaagtgaccatcgactgggacagaagcaccaacaccgcctacctgcagctgagcggactgacatctggcgataccgccgtgtactactgtgccaagggcagcaagcaccggctgagagattacgccctgtacgacgatgacggcgccctgaattgggccgtcgatgtggactacctgagcaacctggaattctggggccagggaacagccgtgacagtgtcttccggcggaggtggaagtggtggcggcggatctggcggcggtgggtccggaggtggtggatctgaacctaagagcagcgacaagacccacacctgtcctccatgtcctgctccagaactgctggccggaccttccgtgttcctgtttcctccaaagcctaaggacaccctgatgatcagcagaacccctgaagtgacctgcgtggtggtggatgtgtctcacgaggaccctgaagtgaagttcaattggtacgtggacggcgtggaagtgcacaacgccaagaccaagcctagagaggaacagtacaacagcacctacagagtggtgtccgtgctgaccgtgctgcaccaggattggctgaacggcaaagagtacaagtgcaaggtgtccaacaaggccctgcctgcccctgaggaaaagaccatcagcaaggccaagggccagcctagggaaccccaagtctgtacactgcctcctagccgcgaggaaatgaccaagaaccaggtgtccctgagctgcgccgtgaagggcttttacccttccgatatcgccgtggaatgggagagcaatggccagcctgagaacaactacaagacaacccctcctgtgctggacagcgacggctcattcttcctggtgtccaagctgacagtggacaagagcagatggcagcagggcaacgtgttcagctgctctgtgctgcacgaagccctgcacagccactacacccagaagtccctgtctctgagccccggcaagtgataa

SEQ ID NO: 611 - DNA, 1653 bp, synthetic construct
  source 1..1653: mol_type = other DNA
atggattggatctggcgcatcctgtttctcgtgggagctgccacaggcgcccacagcgattttgtgctgacacagtctccccacagcctgagcgttacacctggcgagtctgccagcatcagctgcaagtctagccactctctgatccacggcgaccggaacaactacctggcttggtacgtgcagaagcccggcagatctcctcagctgctgatctacctggccagcagcagagcttctggcgtgcccgatagattttctggcagcggcagcgacaaggacttcaccctgaagatctccagagtggaaaccgaggacgtgggcacctactactgtatgcagggcagagagagcccctggacatttggccagggcaccaaggtggacatcaaaggcggcggaggaagcggaggcggaggttctggtggtggtggctctggtggcggaggctcaggcggtggcggatctcaagttcatctgacacagagcggccctgaagtgcggaagcctggcacaagcgtgaaggtgtcctgtaaagcccctggcaacaccctgaaaacctacgacctgcactgggtccgatctgtgcctggacagggactgcaatggatgggctggattagccacgagggcgacaagaaagtgatcgtggaacggttcaaggccaaagtgaccatcgactgggacagaagcaccaacaccgcctacctgcagctgagcggactgacatctggcgataccgccgtgtactactgtgccaagggcagcaagcaccggctgagagattacgccctgtacgacgatgacggcgccctgaattgggccgtcgatgtggactacctgagcaacctggaattctggggccagggaacagccgtgacagtgtcttccggcggaggtggaagtggtggcggcggatctggcggcggtgggtccggaggtggtggatctgaacctaagagcagcgacaagacccacacctgtcctccatgtcctgctccagaactgctggccggaccttccgtgttcctgtttcctccaaagcctaaggacaccctgatgatcagcagaacccctgaagtgacctgcgtggtggtggatgtgtctcacgaggaccctgaagtgaagttcaattggtacgtggacggcgtggaagtgcacaacgccaagaccaagcctagagaggaacagtacaacagcacctacagagtggtgtccgtgctgaccgtgctgcaccaggattggctgaacggcaaagagtacaagtgcaaggtgtccaacaaggccctgcctgcccctatcgaaaagaccatcagcaaggccaagggccagcctagggaaccccaagtctgtacactgcctcctagccgcgaggaaatgaccaagaaccaggtgtccctgagctgcgccgtgaagggcttttacccttccgatatcgccgtggaatgggagagcaatggccagcctgagaacaactacaagacaacccctcctgtgctggacagcgacggctcattcttcctggtgtccaagctgacagtggacaagagcagatggcagcagggcaacgtgttcagctgctctgtgctgcacgaagccctgcacagccactacacccagaagtccctgtctctgagccccggcaagtgataa

SEQ ID NO: 612 - DNA, 1653 bp, synthetic construct
  source 1..1653: mol_type = other DNA
atggattggatctggcgcatcctgtttctcgtgggagctgccacaggcgcccacagcgattttgtgctgacacagtctccccacagcctgagcgttacacctggcgagtctgccagcatcagctgcaagtctagccactctctgatccacggcgaccggaacaactacctggcttggtacgtgcagaagcccggcagatctcctcagctgctgatctacctggccagcagcagagcttctggcgtgcccgatagattttctggcagcggcagcgacaaggacttcaccctgaagatctccagagtggaaaccgaggacgtgggcacctactactgtatgcagggcagagagagcccctggacatttggccagggcaccaaggtggacatcaaaggcggcggaggaagcggaggcggaggttctggtggtggtggctctggtggcggaggctcaggcggtggcggatctcaagttcatctgacacagagcggccctgaagtgcggaagcctggcacaagcgtgaaggtgtcctgtaaagcccctggcaacaccctgaaaacctacgacctgcactgggtccgatctgtgcctggacagggactgcaatggatgggctggattagccacgagggcgacaagaaagtgatcgtggaacggttcaaggccaaagtgaccatcgactgggacagaagcaccaacaccgcctacctgcagctgagcggactgacatctggcgataccgccgtgtactactgtgccaagggcagcaagcaccggctgagagattacgccctgtacgacgatgacggcgccctgaattgggccgtcgatgtggactacctgagcaacctggaattctggggccagggaacagccgtgacagtgtcttccggcggaggtggaagtggtggcggcggatctggcggcggtgggtccggaggtggtggatctgaacctaagagcagcgacaagacccacacctgtcctccatgtcctgctccagaactgctgggcggaccttccgtgttcctgtttcctccaaagcctaaggacaccctgatgatcagcagaacccctgaagtgacctgcgtggtggtggatgtgtctcacgaggaccctgaagtgaagttcaattggtacgtggacggcgtggaagtgcacaacgccaagaccaagcctagagaggaacagtacaacagcacctacagagtggtgtccgtgctgaccgtgctgcaccaggattggctgaacggcaaagagtacaagtgcaaggtgtccaacaaggccctgcctgcccctgaggaaaagaccatcagcaaggccaagggccagcctagggaaccccaagtctgtacactgcctcctagccgcgaggaaatgaccaagaaccaggtgtccctgagctgcgccgtgaagggcttttacccttccgatatcgccgtggaatgggagagcaatggccagcctgagaacaactacaagacaacccctcctgtgctggacagcgacggctcattcttcctggtgtccaagctgacagtggacaagagcagatggcagcagggcaacgtgttcagctgctctgtgctgcacgaagccctgcacagccactacacccagaagtccctgtctctgagccccggcaagtgataa

SEQ ID NO: 613 - DNA, 1653 bp, synthetic construct
  source 1..1653: mol_type = other DNA
atggattggatctggcgcatcctgtttctcgtgggagctgccacaggcgcccacagcgattttgtgctgacacagtctccccacagcctgagcgttacacctggcgagtctgccagcatcagctgcaagtctagccactctctgatccacggcgaccggaacaactacctggcttggtacgtgcagaagcccggcagatctcctcagctgctgatctacctggccagcagcagagcttctggcgtgcccgatagattttctggcagcggcagcgacaaggacttcaccctgaagatctccagagtggaaaccgaggacgtgggcacctactactgtatgcagggcagagagagcccctggacatttggccagggcaccaaggtggacatcaaaggcggcggaggaagcggaggcggaggttctggtggtggtggctctggtggcggaggctcaggcggtggcggatctcaagttcatctgacacagagcggccctgaagtgcggaagcctggcacaagcgtgaaggtgtcctgtaaagcccctggcaacaccctgaaaacctacgacctgcactgggtccgatctgtgcctggacagggactgcaatggatgggctggattagccacgagggcgacaagaaagtgatcgtggaacggttcaaggccaaagtgaccatcgactgggacagaagcaccaacaccgcctacctgcagctgagcggactgacatctggcgataccgccgtgtactactgtgccaagggcagcaagcaccggctgagagattacgccctgtacgacgatgacggcgccctgaattgggccgtcgatgtggactacctgagcaacctggaattctggggccagggaacagccgtgacagtgtcttccggcggaggtggaagtggtggcggcggatctggcggcggtgggtccggaggtggtggatctgaacctaagagcagcgacaagacccacacctgtcctccatgtcctgctccagaactgctcggcggaccttccgtgttcctgtttcctccaaagcctaaggacaccctgatgatcagcagaacccctgaagtgacctgcgtggtggtggatgtgtctcacgaggaccccgaagtgaagttcaattggtacgtggacggcgtggaagtgcacaacgccaagaccaagcctagagaggaacagtacaacagcacctacagagtggtgtccgtgctgacagtgctgcaccaggattggctgaacggcaaagagtacaagtgcaaggtgtccaacaaggccctgcctgctcctatcgagaaaaccatcagcaaggccaagggccagcctagggaaccccaggtttacaccctgcctccatgccgcgaggaaatgaccaagaaccaggtgtccctgtggtgcctcgtgaagggcttctacccttccgatatcgccgtggaatgggagagcaatggccagcctgagaacaactacaagacaacccctcctgtgctggacagcgacggctcattcttcctgtacagcaagctgaccgtggacaagtccagatggcagcagggcaacgtgttcagctgtagcgtgctgcacgaagccctgcacagccactacacccagaagtccctgtctctgagccccggcaagtgataa

SEQ ID NO: 614 - DNA, 1653 bp, synthetic construct
  source 1..1653: mol_type = other DNA
atggattggatctggcgcatcctgtttctcgtgggagctgccacaggcgcccacagcgattttgtgctgacacagtctccccacagcctgagcgttacacctggcgagtctgccagcatcagctgcaagtctagccactctctgatccacggcgaccggaacaactacctggcttggtacgtgcagaagcccggcagatctcctcagctgctgatctacctggccagcagcagagcttctggcgtgcccgatagattttctggcagcggcagcgacaaggacttcaccctgaagatctccagagtggaaaccgaggacgtgggcacctactactgtatgcagggcagagagagcccctggacatttggccagggcaccaaggtggacatcaaaggcggcggaggaagcggaggcggaggttctggtggtggtggctctggtggcggaggctcaggcggtggcggatctcaagttcatctgacacagagcggccctgaagtgcggaagcctggcacaagcgtgaaggtgtcctgtaaagcccctggcaacaccctgaaaacctacgacctgcactgggtccgatctgtgcctggacagggactgcaatggatgggctggattagccacgagggcgacaagaaagtgatcgtggaacggttcaaggccaaagtgaccatcgactgggacagaagcaccaacaccgcctacctgcagctgagcggactgacatctggcgataccgccgtgtactactgtgccaagggcagcaagcaccggctgagagattacgccctgtacgacgatgacggcgccctgaattgggccgtcgatgtggactacctgagcaacctggaattctggggccagggaacagccgtgacagtgtcttccggcggaggtggaagtggtggcggcggatctggcggcggtgggtccggaggtggtggatctgaacctaagagcagcgacaagacccacacctgtcctccatgtcctgctccagaactgctggccggaccttccgtgttcctgtttcctccaaagcctaaggacaccctgatgatcagcagaacccctgaagtgacctgcgtggtggtggatgtgtctcacgaggaccccgaagtgaagttcaattggtacgtggacggcgtggaagtgcacaatgccaagaccaagcctagagaggaacagtacaacagcacctacagagtggtgtccgtgctgaccgtgctgcaccaggattggctgaacggcaaagagtacaagtgcaaggtgtccaacaaggccctgcctctgcctgaggaaaagaccatcagcaaggccaagggccagcctagggaaccccaggtttacaccctgcctccatgccgcgaggaaatgaccaagaaccaggtgtccctgtggtgcctcgtgaagggcttctacccttccgatatcgccgtggaatgggagagcaatggccagcctgagaacaactacaagacaacccctcctgtgctggacagcgacggctcattcttcctgtacagcaagctgaccgtggacaagtccagatggcagcagggcaacgtgttcagctgtagcgtgctgcacgaagccctgcacagccactacacccagaagtccctgtctctgagccccggcaagtgataa

SEQ ID NO: 615 - DNA, 1653 bp, synthetic construct
  source 1..1653: mol_type = other DNA
atggattggatctggcgcatcctgtttctcgtgggagctgccacaggcgcccacagcgattttgtgctgacacagtctccccacagcctgagcgttacacctggcgagtctgccagcatcagctgcaagtctagccactctctgatccacggcgaccggaacaactacctggcttggtacgtgcagaagcccggcagatctcctcagctgctgatctacctggccagcagcagagcttctggcgtgcccgatagattttctggcagcggcagcgacaaggacttcaccctgaagatctccagagtggaaaccgaggacgtgggcacctactactgtatgcagggcagagagagcccctggacatttggccagggcaccaaggtggacatcaaaggcggcggaggaagcggaggcggaggttctggtggtggtggctctggtggcggaggctcaggcggtggcggatctcaagttcatctgacacagagcggccctgaagtgcggaagcctggcacaagcgtgaaggtgtcctgtaaagcccctggcaacaccctgaaaacctacgacctgcactgggtccgatctgtgcctggacagggactgcaatggatgggctggattagccacgagggcgacaagaaagtgatcgtggaacggttcaaggccaaagtgaccatcgactgggacagaagcaccaacaccgcctacctgcagctgagcggactgacatctggcgataccgccgtgtactactgtgccaagggcagcaagcaccggctgagagattacgccctgtacgacgatgacggcgccctgaattgggccgtcgatgtggactacctgagcaacctggaattctggggccagggaacagccgtgacagtgtcttccggcggaggtggaagtggtggcggcggatctggcggcggtgggtccggaggtggtggatctgaacctaagagcagcgacaagacccacacctgtcctccatgtcctgctccagaactgctggccggaccttccgtgttcctgtttcctccaaagcctaaggacaccctgatgatcagcagaacccctgaagtgacctgcgtggtggtggatgtgtctcacgaggaccctgaagtgaagttcaattggtacgtggacggcgtggaagtgcacaacgccaagaccaagcctagagaggaacagtacaacagcacctacagagtggtgtccgtgctgaccgtgctgcaccaggattggctgaacggcaaagagtacaagtgcaaggtgtccaacaaggccctgcctgcccctgaggaaaagaccatcagcaaggccaagggccagcctagggaaccccaggtttacaccctgcctccatgccgcgaggaaatgaccaagaaccaggtgtccctgtggtgcctcgtgaagggcttctacccttccgatatcgccgtggaatgggagagcaatggccagcctgagaacaactacaagacaacccctcctgtgctggacagcgacggctcattcttcctgtacagcaagctgaccgtggacaagtccagatggcagcagggcaacgtgttcagctgtagcgtgctgcacgaagccctgcacagccactacacccagaagtccctgtctctgagccccggcaagtgataa

SEQ ID NO: 616 - DNA, 1653 bp, synthetic construct
  source 1..1653: mol_type = other DNA
atggattggatctggcgcatcctgtttctcgtgggagctgccacaggcgcccacagcgattttgtgctgacacagtctccccacagcctgagcgttacacctggcgagtctgccagcatcagctgcaagtctagccactctctgatccacggcgaccggaacaactacctggcttggtacgtgcagaagcccggcagatctcctcagctgctgatctacctggccagcagcagagcttctggcgtgcccgatagattttctggcagcggcagcgacaaggacttcaccctgaagatctccagagtggaaaccgaggacgtgggcacctactactgtatgcagggcagagagagcccctggacatttggccagggcaccaaggtggacatcaaaggcggcggaggaagcggaggcggaggttctggtggtggtggctctggtggcggaggctcaggcggtggcggatctcaagttcatctgacacagagcggccctgaagtgcggaagcctggcacaagcgtgaaggtgtcctgtaaagcccctggcaacaccctgaaaacctacgacctgcactgggtccgatctgtgcctggacagggactgcaatggatgggctggattagccacgagggcgacaagaaagtgatcgtggaacggttcaaggccaaagtgaccatcgactgggacagaagcaccaacaccgcctacctgcagctgagcggactgacatctggcgataccgccgtgtactactgtgccaagggcagcaagcaccggctgagagattacgccctgtacgacgatgacggcgccctgaattgggccgtcgatgtggactacctgagcaacctggaattctggggccagggaacagccgtgacagtgtcttccggcggaggtggaagtggtggcggcggatctggcggcggtgggtccggaggtggtggatctgaacctaagagcagcgacaagacccacacctgtcctccatgtcctgctccagaactgctggccggaccttccgtgttcctgtttcctccaaagcctaaggacaccctgatgatcagcagaacccctgaagtgacctgcgtggtggtggatgtgtctcacgaggaccctgaagtgaagttcaattggtacgtggacggcgtggaagtgcacaacgccaagaccaagcctagagaggaacagtacaacagcacctacagagtggtgtccgtgctgaccgtgctgcaccaggattggctgaacggcaaagagtacaagtgcaaggtgtccaacaaggccctgcctgcccctatcgaaaagaccatcagcaaggccaagggccagcctagggaaccccaggtttacaccctgcctccatgccgcgaggaaatgaccaagaaccaggtgtccctgtggtgcctcgtgaagggcttctacccttccgatatcgccgtggaatgggagagcaatggccagcctgagaacaactacaagacaacccctcctgtgctggacagcgacggctcattcttcctgtacagcaagctgaccgtggacaagtccagatggcagcagggcaacgtgttcagctgtagcgtgctgcacgaagccctgcacagccactacacccagaagtccctgtctctgagccccggcaagtgataa

SEQ ID NO: 617 - DNA, 1653 bp, synthetic construct
  source 1..1653: mol_type = other DNA
atggattggatctggcgcatcctgtttctcgtgggagctgccacaggcgcccacagcgattttgtgctgacacagtctccccacagcctgagcgttacacctggcgagtctgccagcatcagctgcaagtctagccactctctgatccacggcgaccggaacaactacctggcttggtacgtgcagaagcccggcagatctcctcagctgctgatctacctggccagcagcagagcttctggcgtgcccgatagattttctggcagcggcagcgacaaggacttcaccctgaagatctccagagtggaaaccgaggacgtgggcacctactactgtatgcagggcagagagagcccctggacatttggccagggcaccaaggtggacatcaaaggcggcggaggaagcggaggcggaggttctggtggtggtggctctggtggcggaggctcaggcggtggcggatctcaagttcatctgacacagagcggccctgaagtgcggaagcctggcacaagcgtgaaggtgtcctgtaaagcccctggcaacaccctgaaaacctacgacctgcactgggtccgatctgtgcctggacagggactgcaatggatgggctggattagccacgagggcgacaagaaagtgatcgtggaacggttcaaggccaaagtgaccatcgactgggacagaagcaccaacaccgcctacctgcagctgagcggactgacatctggcgataccgccgtgtactactgtgccaagggcagcaagcaccggctgagagattacgccctgtacgacgatgacggcgccctgaattgggccgtcgatgtggactacctgagcaacctggaattctggggccagggaacagccgtgacagtgtcttccggcggaggtggaagtggtggcggcggatctggcggcggtgggtccggaggtggtggatctgaacctaagagcagcgacaagacccacacctgtcctccatgtcctgctccagaactgctgggcggaccttccgtgttcctgtttcctccaaagcctaaggacaccctgatgatcagcagaacccctgaagtgacctgcgtggtggtggatgtgtctcacgaggaccctgaagtgaagttcaattggtacgtggacggcgtggaagtgcacaacgccaagaccaagcctagagaggaacagtacaacagcacctacagagtggtgtccgtgctgaccgtgctgcaccaggattggctgaacggcaaagagtacaagtgcaaggtgtccaacaaggccctgcctgcccctgaggaaaagaccatcagcaaggccaagggccagcctagggaaccccaggtttacaccctgcctccatgccgcgaggaaatgaccaagaaccaggtgtccctgtggtgcctcgtgaagggcttctacccttccgatatcgccgtggaatgggagagcaatggccagcctgagaacaactacaagacaacccctcctgtgctggacagcgacggctcattcttcctgtacagcaagctgaccgtggacaagtccagatggcagcagggcaacgtgttcagctgtagcgtgctgcacgaagccctgcacagccactacacccagaagtccctgtctctgagccccggcaagtgataa

SEQ ID NO: 618 - DNA, 1653 bp, synthetic construct; identical to SEQ ID NO: 602
  source 1..1653: mol_type = other DNA

SEQ ID NO: 619 - DNA, 1653 bp, synthetic construct; identical to SEQ ID NO: 603
  source 1..1653: mol_type = other DNA

SEQ ID NO: 620 - DNA, 1653 bp, synthetic construct; identical to SEQ ID NO: 604
  source 1..1653: mol_type = other DNA

SEQ ID NO: 621 - DNA, 1653 bp, synthetic construct; identical to SEQ ID NO: 605
  source 1..1653: mol_type = other DNA

SEQ ID NO: 622 - DNA, 1653 bp, synthetic construct; identical to SEQ ID NO: 606
  source 1..1653: mol_type = other DNA

SEQ ID NO: 623 - DNA, 1653 bp, synthetic construct; identical to SEQ ID NO: 607
  source 1..1653: mol_type = other DNA

SEQ ID NO: 624 - DNA, 1653 bp, synthetic construct; identical to SEQ ID NO: 608
  source 1..1653: mol_type = other DNA

SEQ ID NO: 625 - DNA, 1653 bp, synthetic construct; identical to SEQ ID NO: 609
  source 1..1653: mol_type = other DNA

SEQ ID NO: 626 - DNA, 1653 bp, synthetic construct; identical to SEQ ID NO: 610
  source 1..1653: mol_type = other DNA

SEQ ID NO: 627 - DNA, 1653 bp, synthetic construct; identical to SEQ ID NO: 611
  source 1..1653: mol_type = other DNA

SEQ ID NO: 628 - DNA, 1653 bp, synthetic construct; identical to SEQ ID NO: 612
  source 1..1653: mol_type = other DNA

SEQ ID NO: 629 - DNA, 1653 bp, synthetic construct; identical to SEQ ID NO: 613
  source 1..1653: mol_type = other DNA

SEQ ID NO: 630 - DNA, 1653 bp, synthetic construct; identical to SEQ ID NO: 614
  source 1..1653: mol_type = other DNA

SEQ ID NO: 631 - DNA, 1653 bp, synthetic construct; identical to SEQ ID NO: 615
  source 1..1653: mol_type = other DNA

SEQ ID NO: 632 - DNA, 1653 bp, synthetic construct; identical to SEQ ID NO: 616
  source 1..1653: mol_type = other DNA

SEQ ID NO: 633 - DNA, 1653 bp, synthetic construct; identical to SEQ ID NO: 617
  source 1..1653: mol_type = other DNA

SEQ ID NO: 634 - DNA, 1653 bp, synthetic construct
  source 1..1653: mol_type = other DNA
atggattggatctggcgcatcctgtttctcgtgggagctgccacaggcgcccacagcgattttgtgctgacacagtctccccacagcctgagcgttacacctggcgagtctgccagcatcagctgcaagtctagccactctctgatccacggcgaccggaacaactacctggcttggtacgtgcagaagcccggcagatctcctcagctgctgatctacctggccagcagcagagcttctggcgtgcccgatagattttctggcagcggcagcgacaaggacttcaccctgaagatctccagagtggaaaccgaggacgtgggcacctactactgtatgcagggcagagagagcccctggacatttggccagggcaccaaggtggacatcaaaggcggcggaggaagcggaggcggaggttctggtggtggtggctctggtggcggaggctcaggcggtggcggatctcaagttcatctgacacagagcggccctgaagtgcggaagcctggcacaagcgtgaaggtgtcctgtaaagcccctggcaacaccctgaaaacctacgacctgcactgggtccgatctgtgcctggacagggactgcaatggatgggctggattagccacgagggcgacaagaaagtgatcgtggaacggttcaaggccaaagtgaccatcgactgggacagaagcaccaacaccgcctacctgcagctgagcggactgacatctggcgataccgccgtgtactactgtgccaagggcagcaagcaccggctgagagattacgccctgtacgacgatgacggcgccctgaattgggccgtcgatgtggactacctgagcaacctggaattctggggccagggaacagccgtgacagtgtcttccggcggaggtggaagtggtggcggcggatctggcggcggtgggtccggaggtggtggatctgaacctaagagcagcgacaagacccacacctgtcctccatgtcctgctccagaactgctcggcggaccttccgtgttcctgtttcctccaaagcctaaggacaccctgatgatcagcagaacccctgaagtgacctgcgtggtggtggatgtgtctcacgaggaccccgaagtgaagttcaattggtacgtggacggcgtggaagtgcacaacgccaagaccaagcctagagaggaacagtacaacagcacctacagagtggtgtccgtgctgacagtgctgcaccaggattggctgaacggcaaagagtacaagtgcaaggtgtccaacaaggccctgcctgctcctatcgagaaaaccatcagcaaggccaagggccagcctagggaaccccaggtttacacactgcctccaagccgcgacgaactgaccaagaaccaggtgtccctgacctgcctcgtgaagggcttctacccttccgatatcgccgtggaatgggagagcaatggccagcctgagaacaactacaagacaacccctcctgtgctggacagcgacggctcattcttcctgtacagcaagctgactgtggataagtcccggtggcagcagggcaacgtgttcagctgttctgtgatgcacgaagccctgcacaaccactacacccagaaaagcctgtctctgagccccggcaagtgataa

SEQ ID NO: 635 - DNA, 1653 bp, synthetic construct
  source 1..1653: mol_type = other DNA
atggattggatctggcgcatcctgtttctcgtgggagctgccacaggcgcccacagcgattttgtgctgacacagtctccccacagcctgagcgttacacctggcgagtctgccagcatcagctgcaagtctagccactctctgatccacggcgaccggaacaactacctggcttggtacgtgcagaagcccggcagatctcctcagctgctgatctacctggccagcagcagagcttctggcgtgcccgatagattttctggcagcggcagcgacaaggacttcaccctgaagatctccagagtggaaaccgaggacgtgggcacctactactgtatgcagggcagagagagcccctggacatttggccagggcaccaaggtggacatcaaaggcggcggaggaagcggaggcggaggttctggtggtggtggctctggtggcggaggctcaggcggtggcggatctcaagttcatctgacacagagcggccctgaagtgcggaagcctggcacaagcgtgaaggtgtcctgtaaagcccctggcaacaccctgaaaacctacgacctgcactgggtccgatctgtgcctggacagggactgcaatggatgggctggattagccacgagggcgacaagaaagtgatcgtggaacggttcaaggccaaagtgaccatcgactgggacagaagcaccaacaccgcctacctgcagctgagcggactgacatctggcgataccgccgtgtactactgtgccaagggcagcaagcaccggctgagagattacgccctgtacgacgatgacggcgccctgaattgggccgtcgatgtggactacctgagcaacctggaattctggggccagggaacagccgtgacagtgtcttccggcggaggtggaagtggtggcggcggatctggcggcggtgggtccggaggtggtggatctgaacctaagagcagcgacaagacccacacctgtcctccatgtcctgctccagaactgctcggcggaccttccgtgttcctgtttcctccaaagcctaaggacaccctgatgatcagcagaacccctgaagtgacctgcgtggtggtggatgtgtctcacgaggaccccgaagtgaagttcaattggtacgtggacggcgtggaagtgcacaacgccaagaccaagcctagagaggaacagtacaacagcacctacagagtggtgtccgtgctgacagtgctgcaccaggattggctgaacggcaaagagtacaagtgcaaggtgtccaacaaggccctgcctgctcctatcgagaaaaccatcagcaaggccaagggccagcctagggaaccccaggtttacacactgcctccaagccgcgacgaactgaccaagaaccaggtgtccctgacctgcctcgtgaagggcttctacccttccgatatcgccgtggaatgggagagcaatggccagcctgagaacaactacaagacaacccctcctgtgctggacagcgacggctcattcttcctgtacagcaagctgaccgtggacaagtccagatggcagcagggcaacgtgttcagctgtagcgtgctgcacgaagccctgcacagccactacacccagaaaagcctgtctctgagccccggcaaatgataa

SEQ ID NO: 636 - DNA, 1653 bp, synthetic construct
  source 1..1653: mol_type = other DNA
atggattggatctggcgcatcctgtttctcgtgggagctgccacaggcgcccacagcgattttgtgctgacacagtctccccacagcctgagcgttacacctggcgagtctgccagcatcagctgcaagtctagccactctctgatccacggcgaccggaacaactacctggcttggtacgtgcagaagcccggcagatctcctcagctgctgatctacctggccagcagcagagcttctggcgtgcccgatagattttctggcagcggcagcgacaaggacttcaccctgaagatctccagagtggaaaccgaggacgtgggcacctactactgtatgcagggcagagagagcccctggacatttggccagggcaccaaggtggacatcaaaggcggcggaggaagcggaggcggaggttctggtggtggtggctctggtggcggaggctcaggcggtggcggatctcaagttcatctgacacagagcggccctgaagtgcggaagcctggcacaagcgtgaaggtgtcctgtaaagcccctggcaacaccctgaaaacctacgacctgcactgggtccgatctgtgcctggacagggactgcaatggatgggctggattagccacgagggcgacaagaaagtgatcgtggaacggttcaaggccaaagtgaccatcgactgggacagaagcaccaacaccgcctacctgcagctgagcggactgacatctggcgataccgccgtgtactactgtgccaagggcagcaagcaccggctgagagattacgccctgtacgacgatgacggcgccctgaattgggccgtcgatgtggactacctgagcaacctggaattctggggccagggaacagccgtgacagtgtcttccggcggaggtggaagtggtggcggcggatctggcggcggtgggtccggaggtggtggatctgaacctaagagcagcgacaagacccacacctgtcctccatgtcctgctccagaactgctggccggaccttccgtgttcctgtttcctccaaagcctaaggacaccctgatgatcagcagaacccctgaagtgacctgcgtggtggtggatgtgtctcacgaggaccccgaagtgaagttcaattggtacgtggacggcgtggaagtgcacaatgccaagaccaagcctagagaggaacagtacaacagcacctacagagtggtgtccgtgctgaccgtgctgcaccaggattggctgaacggcaaagagtacaagtgcaaggtgtccaacaaggccctgcctctgcctgaggaaaagaccatcagcaaggccaagggccagcctagggaaccccaggtttacacactgcctccaagccgcgacgaactgaccaagaaccaggtgtccctgacctgcctcgtgaagggcttctacccttccgatatcgccgtggaatgggagagcaatggccagcctgagaacaactacaagacaacccctcctgtgctggacagcgacggctcattcttcctgtacagcaagctgaccgtggacaagtccagatggcagcagggcaacgtgttcagctgtagcgtgctgcacgaagccctgcacagccactacacccagaaaagcctgtctctgagccccggcaaatgataa

SEQ ID NO: 637 - DNA, 1653 bp, synthetic construct
  source 1..1653: mol_type = other DNA
atggattggatctggcgcatcctgtttctcgtgggagctgccacaggcgcccacagcgattttgtgctgacacagtctccccacagcctgagcgttacacctggcgagtctgccagcatcagctgcaagtctagccactctctgatccacggcgaccggaacaactacctggcttggtacgtgcagaagcccggcagatctcctcagctgctgatctacctggccagcagcagagcttctggcgtgcccgatagattttctggcagcggcagcgacaaggacttcaccctgaagatctccagagtggaaaccgaggacgtgggcacctactactgtatgcagggcagagagagcccctggacatttggccagggcaccaaggtggacatcaaaggcggcggaggaagcggaggcggaggttctggtggtggtggctctggtggcggaggctcaggcggtggcggatctcaagttcatctgacacagagcggccctgaagtgcggaagcctggcacaagcgtgaaggtgtcctgtaaagcccctggcaacaccctgaaaacctacgacctgcactgggtccgatctgtgcctggacagggactgcaatggatgggctggattagccacgagggcgacaagaaagtgatcgtggaacggttcaaggccaaagtgaccatcgactgggacagaagcaccaacaccgcctacctgcagctgagcggactgacatctggcgataccgccgtgtactactgtgccaagggcagcaagcaccggctgagagattacgccctgtacgacgatgacggcgccctgaattgggccgtcgatgtggactacctgagcaacctggaattctggggccagggaacagccgtgacagtgtcttccggcggaggtggaagtggtggcggcggatctggcggcggtgggtccggaggtggtggatctgaacctaagagcagcgacaagacccacacctgtcctccatgtcctgctccagaactgctggccggaccttccgtgttcctgtttcctccaaagcctaaggacaccctgatgatcagcagaacccctgaagtgacctgcgtggtggtggatgtgtctcacgaggaccctgaagtgaagttcaattggtacgtggacggcgtggaagtgcacaacgccaagaccaagcctagagaggaacagtacaacagcacctacagagtggtgtccgtgctgaccgtgctgcaccaggattggctgaacggcaaagagtacaagtgcaaggtgtccaacaaggccctgcctgcccctgaggaaaagaccatcagcaaggccaagggccagcctagggaaccccaggtttacacactgcctccaagccgcgacgaactgaccaagaaccaggtgtccctgacctgcctcgtgaagggcttctacccttccgatatcgccgtggaatgggagagcaatggccagcctgagaacaactacaagacaacccctcctgtgctggacagcgacggctcattcttcctgtacagcaagctgaccgtggacaagtccagatggcagcagggcaacgtgttcagctgtagcgtgctgcacgaagccctgcacagccactacacccagaaaagcctgtctctgagccccggcaaatgataa

SEQ ID NO: 638 - DNA, 1653 bp, synthetic construct
  source 1..1653: mol_type = other DNA
atggattggatctggcgcatcctgtttctcgtgggagctgccacaggcgcccacagcgattttgtgctgacacagtctccccacagcctgagcgttacacctggcgagtctgccagcatcagctgcaagtctagccactctctgatccacggcgaccggaacaactacctggcttggtacgtgcagaagcccggcagatctcctcagctgctgatctacctggccagcagcagagcttctggcgtgcccgatagattttctggcagcggcagcgacaaggacttcaccctgaagatctccagagtggaaaccgaggacgtgggcacctactactgtatgcagggcagagagagcccctggacatttggccagggcaccaaggtggacatcaaaggcggcggaggaagcggaggcggaggttctggtggtggtggctctggtggcggaggctcaggcggtggcggatctcaagttcatctgacacagagcggccctgaagtgcggaagcctggcacaagcgtgaaggtgtcctgtaaagcccctggcaacaccctgaaaacctacgacctgcactgggtccgatctgtgcctggacagggactgcaatggatgggctggattagccacgagggcgacaagaaagtgatcgtggaacggttcaaggccaaagtgaccatcgactgggacagaagcaccaacaccgcctacctgcagctgagcggactgacatctggcgataccgccgtgtactactgtgccaagggcagcaagcaccggctgagagattacgccctgtacgacgatgacggcgccctgaattgggccgtcgatgtggactacctgagcaacctggaattctggggccagggaacagccgtgacagtgtcttccggcggaggtggaagtggtggcggcggatctggcggcggtgggtccggaggtggtggatctgaacctaagagcagcgacaagacccacacctgtcctccatgtcctgctccagaactgctggccggaccttccgtgttcctgtttcctccaaagcctaaggacaccctgatgatcagcagaacccctgaagtgacctgcgtggtggtggatgtgtctcacgaggaccctgaagtgaagttcaattggtacgtggacggcgtggaagtgcacaacgccaagaccaagcctagagaggaacagtacaacagcacctacagagtggtgtccgtgctgaccgtgctgcaccaggattggctgaacggcaaagagtacaagtgcaaggtgtccaacaaggccctgcctgcccctatcgaaaagaccatcagcaaggccaagggccagcctagggaaccccaggtttacacactgcctccaagccgcgacgaactgaccaagaaccaggtgtccctgacctgcctcgtgaagggcttctacccttccgatatcgccgtggaatgggagagcaatggccagcctgagaacaactacaagacaacccctcctgtgctggacagcgacggctcattcttcctgtacagcaagctgaccgtggacaagtccagatggcagcagggcaacgtgttcagctgtagcgtgctgcacgaagccctgcacagccactacacccagaaaagcctgtctctgagccccggcaaatgataa

SEQ ID NO: 639 - DNA, 1653 bp, synthetic construct
  source 1..1653: mol_type = other DNA
atggattggatctggcgcatcctgtttctcgtgggagctgccacaggcgcccacagcgattttgtgctgacacagtctccccacagcctgagcgttacacctggcgagtctgccagcatcagctgcaagtctagccactctctgatccacggcgaccggaacaactacctggcttggtacgtgcagaagcccggcagatctcctcagctgctgatctacctggccagcagcagagcttctggcgtgcccgatagattttctggcagcggcagcgacaaggacttcaccctgaagatctccagagtggaaaccgaggacgtgggcacctactactgtatgcagggcagagagagcccctggacatttggccagggcaccaaggtggacatcaaaggcggcggaggaagcggaggcggaggttctggtggtggtggctctggtggcggaggctcaggcggtggcggatctcaagttcatctgacacagagcggccctgaagtgcggaagcctggcacaagcgtgaaggtgtcctgtaaagcccctggcaacaccctgaaaacctacgacctgcactgggtccgatctgtgcctggacagggactgcaatggatgggctggattagccacgagggcgacaagaaagtgatcgtggaacggttcaaggccaaagtgaccatcgactgggacagaagcaccaacaccgcctacctgcagctgagcggactgacatctggcgataccgccgtgtactactgtgccaagggcagcaagcaccggctgagagattacgccctgtacgacgatgacggcgccctgaattgggccgtcgatgtggactacctgagcaacctggaattctggggccagggaacagccgtgacagtgtcttccggcggaggtggaagtggtggcggcggatctggcggcggtgggtccggaggtggtggatctgaacctaagagcagcgacaagacccacacctgtcctccatgtcctgctccagaactgctgggcggaccttccgtgttcctgtttcctccaaagcctaaggacaccctgatgatcagcagaacccctgaagtgacctgcgtggtggtggatgtgtctcacgaggaccctgaagtgaagttcaattggtacgtggacggcgtggaagtgcacaacgccaagaccaagcctagagaggaacagtacaacagcacctacagagtggtgtccgtgctgaccgtgctgcaccaggattggctgaacggcaaagagtacaagtgcaaggtgtccaacaaggccctgcctgcccctgaggaaaagaccatcagcaaggccaagggccagcctagggaaccccaggtttacacactgcctccaagccgcgacgaactgaccaagaaccaggtgtccctgacctgcctcgtgaagggcttctacccttccgatatcgccgtggaatgggagagcaatggccagcctgagaacaactacaagacaacccctcctgtgctggacagcgacggctcattcttcctgtacagcaagctgaccgtggacaagtccagatggcagcagggcaacgtgttcagctgtagcgtgctgcacgaagccctgcacagccactacacccagaaaagcctgtctctgagccccggcaaatgataa

SEQ ID NO: 640 - DNA, 1653 bp, synthetic construct
  source 1..1653: mol_type = other DNA
atggattggatctggcgcatcctgtttctcgtgggagctgccacaggcgcccacagcgattttgtgctgacacagtctccccacagcctgagcgttacacctggcgagtctgccagcatcagctgcaagtctagccactctctgatccacggcgaccggaacaactacctggcttggtacgtgcagaagcccggcagatctcctcagctgctgatctacctggccagcagcagagcttctggcgtgcccgatagattttctggcagcggcagcgacaaggacttcaccctgaagatctccagagtggaaaccgaggacgtgggcacctactactgtatgcagggcagagagagcccctggacatttggccagggcaccaaggtggacatcaaaggcggcggaggaagcggaggcggaggttctggtggtggtggctctggtggcggaggctcaggcggtggcggatctcaagttcatctgacacagagcggccctgaagtgcggaagcctggcacaagcgtgaaggtgtcctgtaaagcccctggcaacaccctgaaaacctacgacctgcactgggtccgatctgtgcctggacagggactgcaatggatgggctggattagccacgagggcgacaagaaagtgatcgtggaacggttcaaggccaaagtgaccatcgactgggacagaagcaccaacaccgcctacctgcagctgagcggactgacatctggcgataccgccgtgtactactgtgccaagggcagcaagcaccggctgagagattacgccctgtacgacgatgacggcgccctgaattgggccgtcgatgtggactacctgagcaacctggaattctggggccagggaacagccgtgacagtgtcttccggcggaggtggaagtggtggcggcggatctggcggcggtgggtccggaggtggtggatctgaacctaagagcagcgacaagacccacacctgtcctccatgtcctgctccagaactgctcggcggaccttccgtgttcctgtttcctccaaagcctaaggacaccctgatgatcagcagaacccctgaagtgacctgcgtggtggtggatgtgtctcacgaggaccccgaagtgaagttcaattggtacgtggacggcgtggaagtgcacaacgccaagaccaagcctagagaggaacagtacaacagcacctacagagtggtgtccgtgctgacagtgctgcaccaggattggctgaacggcaaagagtacaagtgcaaggtgtccaacaaggccctgcctgctcctatcgagaaaaccatcagcaaggccaagggccagcctcgcgaacctcaagtctgtacactgcctcctagccgcgacgaactgaccaagaaccaggtgtccctgagctgcgccgtgaagggcttttacccttccgatatcgccgtggaatgggagagcaatggccagcctgagaacaactacaagacaacccctcctgtgctggacagcgacggctcattcttcctggtgtccaagctgacagtggacaagagcagatggcagcagggcaacgtgttcagctgcagcgtgctgcatgaagccctgcacagccactacacccagaagtccctgtctctgagccccggcaagtgataa

SEQ ID NO: 641 - DNA, 1653 bp, synthetic construct
  source 1..1653: mol_type = other DNA
atggattggatctggcgcatcctgtttctcgtgggagctgccacaggcgcccacagcgattttgtgctgacacagtctccccacagcctgagcgttacacctggcgagtctgccagcatcagctgcaagtctagccactctctgatccacggcgaccggaacaactacctggcttggtacgtgcagaagcccggcagatctcctcagctgctgatctacctggccagcagcagagcttctggcgtgcccgatagattttctggcagcggcagcgacaaggacttcaccctgaagatctccagagtggaaaccgaggacgtgggcacctactactgtatgcagggcagagagagcccctggacatttggccagggcaccaaggtggacatcaaaggcggcggaggaagcggaggcggaggttctggtggtggtggctctggtggcggaggctcaggcggtggcggatctcaagttcatctgacacagagcggccctgaagtgcggaagcctggcacaagcgtgaaggtgtcctgtaaagcccctggcaacaccctgaaaacctacgacctgcactgggtccgatctgtgcctggacagggactgcaatggatgggctggattagccacgagggcgacaagaaagtgatcgtggaacggttcaaggccaaagtgaccatcgactgggacagaagcaccaacaccgcctacctgcagctgagcggactgacatctggcgataccgccgtgtactactgtgccaagggcagcaagcaccggctgagagattacgccctgtacgacgatgacggcgccctgaattgggccgtcgatgtggactacctgagcaacctggaattctggggccagggaacagccgtgacagtgtcttccggcggaggtggaagtggtggcggcggatctggcggcggtgggtccggaggtggtggatctgaacctaagagcagcgacaagacccacacctgtcctccatgtcctgctccagaactgctggccggaccttccgtgttcctgtttcctccaaagcctaaggacaccctgatgatcagcagaacccctgaagtgacctgcgtggtggtggatgtgtctcacgaggaccccgaagtgaagttcaattggtacgtggacggcgtggaagtgcacaatgccaagaccaagcctagagaggaacagtacaacagcacctacagagtggtgtccgtgctgaccgtgctgcaccaggattggctgaacggcaaagagtacaagtgcaaggtgtccaacaaggccctgcctctgcctgaggaaaagaccatcagcaaggccaagggccagcctcgcgaacctcaagtctgtacactgcctcctagccgcgacgaactgaccaagaaccaggtgtccctgagctgcgccgtgaagggcttttacccttccgatatcgccgtggaatgggagagcaatggccagcctgagaacaactacaagacaacccctcctgtgctggacagcgacggctcattcttcctggtgtccaagctgacagtggacaagagcagatggcagcagggcaacgtgttcagctgcagcgtgctgcatgaagccctgcacagccactacacccagaagtccctgtctctgagccccggcaagtgataa

SEQ ID NO: 642 - DNA, 1653 bp, synthetic construct
  source 1..1653: mol_type = other DNA
atggattggatctggcgcatcctgtttctcgtgggagctgccacaggcgcccacagcgattttgtgctgacacagtctccccacagcctgagcgttacacctggcgagtctgccagcatcagctgcaagtctagccactctctgatccacggcgaccggaacaactacctggcttggtacgtgcagaagcccggcagatctcctcagctgctgatctacctggccagcagcagagcttctggcgtgcccgatagattttctggcagcggcagcgacaaggacttcaccctgaagatctccagagtggaaaccgaggacgtgggcacctactactgtatgcagggcagagagagcccctggacatttggccagggcaccaaggtggacatcaaaggcggcggaggaagcggaggcggaggttctggtggtggtggctctggtggcggaggctcaggcggtggcggatctcaagttcatctgacacagagcggccctgaagtgcggaagcctggcacaagcgtgaaggtgtcctgtaaagcccctggcaacaccctgaaaacctacgacctgcactgggtccgatctgtgcctggacagggactgcaatggatgggctggattagccacgagggcgacaagaaagtgatcgtggaacggttcaaggccaaagtgaccatcgactgggacagaagcaccaacaccgcctacctgcagctgagcggactgacatctggcgataccgccgtgtactactgtgccaagggcagcaagcaccggctgagagattacgccctgtacgacgatgacggcgccctgaattgggccgtcgatgtggactacctgagcaacctggaattctggggccagggaacagccgtgacagtgtcttccggcggaggtggaagtggtggcggcggatctggcggcggtgggtccggaggtggtggatctgaacctaagagcagcgacaagacccacacctgtcctccatgtcctgctccagaactgctggccggaccttccgtgttcctgtttcctccaaagcctaaggacaccctgatgatcagcagaacccctgaagtgacctgcgtggtggtggatgtgtctcacgaggaccctgaagtgaagttcaattggtacgtggacggcgtggaagtgcacaacgccaagaccaagcctagagaggaacagtacaacagcacctacagagtggtgtccgtgctgaccgtgctgcaccaggattggctgaacggcaaagagtacaagtgcaaggtgtccaacaaggccctgcctgcccctgaggaaaagaccatcagcaaggccaagggccagcctcgcgaacctcaagtctgtacactgcctcctagccgcgacgaactgaccaagaaccaggtgtccctgagctgcgccgtgaagggcttttacccttccgatatcgccgtggaatgggagagcaatggccagcctgagaacaactacaagacaacccctcctgtgctggacagcgacggctcattcttcctggtgtccaagctgacagtggacaagagcagatggcagcagggcaacgtgttcagctgcagcgtgctgcatgaagccctgcacagccactacacccagaagtccctgtctctgagccccggcaagtgataa

SEQ ID NO: 643 - DNA, 1653 bp, synthetic construct
  source 1..1653: mol_type = other DNA
atggattggatctggcgcatcctgtttctcgtgggagctgccacaggcgcccacagcgattttgtgctgacacagtctccccacagcctgagcgttacacctggcgagtctgccagcatcagctgcaagtctagccactctctgatccacggcgaccggaacaactacctggcttggtacgtgcagaagcccggcagatctcctcagctgctgatctacctggccagcagcagagcttctggcgtgcccgatagattttctggcagcggcagcgacaaggacttcaccctgaagatctccagagtggaaaccgaggacgtgggcacctactactgtatgcagggcagagagagcccctggacatttggccagggcaccaaggtggacatcaaaggcggcggaggaagcggaggcggaggttctggtggtggtggctctggtggcggaggctcaggcggtggcggatctcaagttcatctgacacagagcggccctgaagtgcggaagcctggcacaagcgtgaaggtgtcctgtaaagcccctggcaacaccctgaaaacctacgacctgcactgggtccgatctgtgcctggacagggactgcaatggatgggctggattagccacgagggcgacaagaaagtgatcgtggaacggttcaaggccaaagtgaccatcgactgggacagaagcaccaacaccgcctacctgcagctgagcggactgacatctggcgataccgccgtgtactactgtgccaagggcagcaagcaccggctgagagattacgccctgtacgacgatgacggcgccctgaattgggccgtcgatgtggactacctgagcaacctggaattctggggccagggaacagccgtgacagtgtcttccggcggaggtggaagtggtggcggcggatctggcggcggtgggtccggaggtggtggatctgaacctaagagcagcgacaagacccacacctgtcctccatgtcctgctccagaactgctggccggaccttccgtgttcctgtttcctccaaagcctaaggacaccctgatgatcagcagaacccctgaagtgacctgcgtggtggtggatgtgtctcacgaggaccctgaagtgaagttcaattggtacgtggacggcgtggaagtgcacaacgccaagaccaagcctagagaggaacagtacaacagcacctacagagtggtgtccgtgctgaccgtgctgcaccaggattggctgaacggcaaagagtacaagtgcaaggtgtccaacaaggccctgcctgcccctatcgaaaagaccatcagcaaggccaagggccagcctcgcgaacctcaagtctgtacactgcctcctagccgcgacgaactgaccaagaaccaggtgtccctgagctgcgccgtgaagggcttttacccttccgatatcgccgtggaatgggagagcaatggccagcctgagaacaactacaagacaacccctcctgtgctggacagcgacggctcattcttcctggtgtccaagctgacagtggacaagagcagatggcagcagggcaacgtgttcagctgcagcgtgctgcatgaagccctgcacagccactacacccagaagtccctgtctctgagccccggcaagtgataa

SEQ ID NO: 644 - DNA, 1653 bp, synthetic construct
  source 1..1653: mol_type = other DNA
atggattggatctggcgcatcctgtttctcgtgggagctgccacaggcgcccacagcgattttgtgctgacacagtctccccacagcctgagcgttacacctggcgagtctgccagcatcagctgcaagtctagccactctctgatccacggcgaccggaacaactacctggcttggtacgtgcagaagcccggcagatctcctcagctgctgatctacctggccagcagcagagcttctggcgtgcccgatagattttctggcagcggcagcgacaaggacttcaccctgaagatctccagagtggaaaccgaggacgtgggcacctactactgtatgcagggcagagagagcccctggacatttggccagggcaccaaggtggacatcaaaggcggcggaggaagcggaggcggaggttctggtggtggtggctctggtggcggaggctcaggcggtggcggatctcaagttcatctgacacagagcggccctgaagtgcggaagcctggcacaagcgtgaaggtgtcctgtaaagcccctggcaacaccctgaaaacctacgacctgcactgggtccgatctgtgcctggacagggactgcaatggatgggctggattagccacgagggcgacaagaaagtgatcgtggaacggttcaaggccaaagtgaccatcgactgggacagaagcaccaacaccgcctacctgcagctgagcggactgacatctggcgataccgccgtgtactactgtgccaagggcagcaagcaccggctgagagattacgccctgtacgacgatgacggcgccctgaattgggccgtcgatgtggactacctgagcaacctggaattctggggccagggaacagccgtgacagtgtcttccggcggaggtggaagtggtggcggcggatctggcggcggtgggtccggaggtggtggatctgaacctaagagcagcgacaagacccacacctgtcctccatgtcctgctccagaactgctgggcggaccttccgtgttcctgtttcctccaaagcctaaggacaccctgatgatcagcagaacccctgaagtgacctgcgtggtggtggatgtgtctcacgaggaccctgaagtgaagttcaattggtacgtggacggcgtggaagtgcacaacgccaagaccaagcctagagaggaacagtacaacagcacctacagagtggtgtccgtgctgaccgtgctgcaccaggattggctgaacggcaaagagtacaagtgcaaggtgtccaacaaggccctgcctgcccctgaggaaaagaccatcagcaaggccaagggccagcctcgcgaacctcaagtctgtacactgcctcctagccgcgacgaactgaccaagaaccaggtgtccctgagctgcgccgtgaagggcttttacccttccgatatcgccgtggaatgggagagcaatggccagcctgagaacaactacaagacaacccctcctgtgctggacagcgacggctcattcttcctggtgtccaagctgacagtggacaagagcagatggcagcagggcaacgtgttcagctgcagcgtgctgcatgaagccctgcacagccactacacccagaagtccctgtctctgagccccggcaagtgataa

SEQ ID NO: 645 - DNA, 1653 bp, synthetic construct
  source 1..1653: mol_type = other DNA
atggattggatctggcgcatcctgtttctcgtgggagctgccacaggcgcccacagcgattttgtgctgacacagtctccccacagcctgagcgttacacctggcgagtctgccagcatcagctgcaagtctagccactctctgatccacggcgaccggaacaactacctggcttggtacgtgcagaagcccggcagatctcctcagctgctgatctacctggccagcagcagagcttctggcgtgcccgatagattttctggcagcggcagcgacaaggacttcaccctgaagatctccagagtggaaaccgaggacgtgggcacctactactgtatgcagggcagagagagcccctggacatttggccagggcaccaaggtggacatcaaaggcggcggaggaagcggaggcggaggttctggtggtggtggctctggtggcggaggctcaggcggtggcggatctcaagttcatctgacacagagcggccctgaagtgcggaagcctggcacaagcgtgaaggtgtcctgtaaagcccctggcaacaccctgaaaacctacgacctgcactgggtccgatctgtgcctggacagggactgcaatggatgggctggattagccacgagggcgacaagaaagtgatcgtggaacggttcaaggccaaagtgaccatcgactgggacagaagcaccaacaccgcctacctgcagctgagcggactgacatctggcgataccgccgtgtactactgtgccaagggcagcaagcaccggctgagagattacgccctgtacgacgatgacggcgccctgaattgggccgtcgatgtggactacctgagcaacctggaattctggggccagggaacagccgtgacagtgtcttccggcggaggtggaagtggtggcggcggatctggcggcggtgggtccggaggtggtggatctgaacctaagagcagcgacaagacccacacctgtcctccatgtcctgctccagaactgctcggcggaccttccgtgttcctgtttcctccaaagcctaaggacaccctgatgatcagcagaacccctgaagtgacctgcgtggtggtggatgtgtctcacgaggaccccgaagtgaagttcaattggtacgtggacggcgtggaagtgcacaacgccaagaccaagcctagagaggaacagtacaacagcacctacagagtggtgtccgtgctgacagtgctgcaccaggattggctgaacggcaaagagtacaagtgcaaggtgtccaacaaggccctgcctgctcctatcgagaaaaccatcagcaaggccaagggccagcctagggaaccccaggtttacaccctgcctccatgccgcgacgaactgaccaagaaccaggtgtccctgtggtgcctggtcaagggcttctacccttccgatatcgccgtggaatgggagagcaatggccagcctgagaacaactacaagacaacccctcctgtgctggacagcgacggctcattcttcctgtacagcaagctgacagtggacaagagcagatggcagcagggcaacgtgttcagctgcagcgtgctgcatgaagccctgcacagccactacacccagaagtccctgtctctgagccccggcaagtgataa

SEQ ID NO: 646 - DNA, 1653 bp, synthetic construct
  source 1..1653: mol_type = other DNA
atggattggatctggcgcatcctgtttctcgtgggagctgccacaggcgcccacagcgattttgtgctgacacagtctccccacagcctgagcgttacacctggcgagtctgccagcatcagctgcaagtctagccactctctgatccacggcgaccggaacaactacctggcttggtacgtgcagaagcccggcagatctcctcagctgctgatctacctggccagcagcagagcttctggcgtgcccgatagattttctggcagcggcagcgacaaggacttcaccctgaagatctccagagtggaaaccgaggacgtgggcacctactactgtatgcagggcagagagagcccctggacatttggccagggcaccaaggtggacatcaaaggcggcggaggaagcggaggcggaggttctggtggtggtggctctggtggcggaggctcaggcggtggcggatctcaagttcatctgacacagagcggccctgaagtgcggaagcctggcacaagcgtgaaggtgtcctgtaaagcccctggcaacaccctgaaaacctacgacctgcactgggtccgatctgtgcctggacagggactgcaatggatgggctggattagccacgagggcgacaagaaagtgatcgtggaacggttcaaggccaaagtgaccatcgactgggacagaagcaccaacaccgcctacctgcagctgagcggactgacatctggcgataccgccgtgtactactgtgccaagggcagcaagcaccggctgagagattacgccctgtacgacgatgacggcgccctgaattgggccgtcgatgtggactacctgagcaacctggaattctggggccagggaacagccgtgacagtgtcttccggcggaggtggaagtggtggcggcggatctggcggcggtgggtccggaggtggtggatctgaacctaagagcagcgacaagacccacacctgtcctccatgtcctgctccagaactgctggccggaccttccgtgttcctgtttcctccaaagcctaaggacaccctgatgatcagcagaacccctgaagtgacctgcgtggtggtggatgtgtctcacgaggaccccgaagtgaagttcaattggtacgtggacggcgtggaagtgcacaatgccaagaccaagcctagagaggaacagtacaacagcacctacagagtggtgtccgtgctgaccgtgctgcaccaggattggctgaacggcaaagagtacaagtgcaaggtgtccaacaaggccctgcctctgcctgaggaaaagaccatcagcaaggccaagggccagcctagggaaccccaggtttacaccctgcctccatgccgcgacgaactgaccaagaaccaggtgtccctgtggtgcctggtcaagggcttctacccttccgatatcgccgtggaatgggagagcaatggccagcctgagaacaactacaagacaacccctcctgtgctggacagcgacggctcattcttcctgtacagcaagctgacagtggacaagagcagatggcagcagggcaacgtgttcagctgcagcgtgctgcatgaagccctgcacagccactacacccagaagtccctgtctctgagccccggcaagtgataa

SEQ ID NO: 647 - DNA, 1653 bp, synthetic construct
  source 1..1653: mol_type = other DNA
atggattggatctggcgcatcctgtttctcgtgggagctgccacaggcgcccacagcgattttgtgctgacacagtctccccacagcctgagcgttacacctggcgagtctgccagcatcagctgcaagtctagccactctctgatccacggcgaccggaacaactacctggcttggtacgtgcagaagcccggcagatctcctcagctgctgatctacctggccagcagcagagcttctggcgtgcccgatagattttctggcagcggcagcgacaaggacttcaccctgaagatctccagagtggaaaccgaggacgtgggcacctactactgtatgcagggcagagagagcccctggacatttggccagggcaccaaggtggacatcaaaggcggcggaggaagcggaggcggaggttctggtggtggtggctctggtggcggaggctcaggcggtggcggatctcaagttcatctgacacagagcggccctgaagtgcggaagcctggcacaagcgtgaaggtgtcctgtaaagcccctggcaacaccctgaaaacctacgacctgcactgggtccgatctgtgcctggacagggactgcaatggatgggctggattagccacgagggcgacaagaaagtgatcgtggaacggttcaaggccaaagtgaccatcgactgggacagaagcaccaacaccgcctacctgcagctgagcggactgacatctggcgataccgccgtgtactactgtgccaagggcagcaagcaccggctgagagattacgccctgtacgacgatgacggcgccctgaattgggccgtcgatgtggactacctgagcaacctggaattctggggccagggaacagccgtgacagtgtcttccggcggaggtggaagtggtggcggcggatctggcggcggtgggtccggaggtggtggatctgaacctaagagcagcgacaagacccacacctgtcctccatgtcctgctccagaactgctggccggaccttccgtgttcctgtttcctccaaagcctaaggacaccctgatgatcagcagaacccctgaagtgacctgcgtggtggtggatgtgtctcacgaggaccctgaagtgaagttcaattggtacgtggacggcgtggaagtgcacaacgccaagaccaagcctagagaggaacagtacaacagcacctacagagtggtgtccgtgctgaccgtgctgcaccaggattggctgaacggcaaagagtacaagtgcaaggtgtccaacaaggccctgcctgcccctgaggaaaagaccatcagcaaggccaagggccagcctagggaaccccaggtttacaccctgcctccatgccgcgacgaactgaccaagaaccaggtgtccctgtggtgcctggtcaagggcttctacccttccgatatcgccgtggaatgggagagcaatggccagcctgagaacaactacaagacaacccctcctgtgctggacagcgacggctcattcttcctgtacagcaagctgacagtggacaagagcagatggcagcagggcaacgtgttcagctgcagcgtgctgcatgaagccctgcacagccactacacccagaagtccctgtctctgagccccggcaagtgataa

SEQ ID NO: 648 - DNA, 1653 bp, synthetic construct
  source 1..1653: mol_type = other DNA
atggattggatctggcgcatcctgtttctcgtgggagctgccacaggcgcccacagcgattttgtgctgacacagtctccccacagcctgagcgttacacctggcgagtctgccagcatcagctgcaagtctagccactctctgatccacggcgaccggaacaactacctggcttggtacgtgcagaagcccggcagatctcctcagctgctgatctacctggccagcagcagagcttctggcgtgcccgatagattttctggcagcggcagcgacaaggacttcaccctgaagatctccagagtggaaaccgaggacgtgggcacctactactgtatgcagggcagagagagcccctggacatttggccagggcaccaaggtggacatcaaaggcggcggaggaagcggaggcggaggttctggtggtggtggctctggtggcggaggctcaggcggtggcggatctcaagttcatctgacacagagcggccctgaagtgcggaagcctggcacaagcgtgaaggtgtcctgtaaagcccctggcaacaccctgaaaacctacgacctgcactgggtccgatctgtgcctggacagggactgcaatggatgggctggattagccacgagggcgacaagaaagtgatcgtggaacggttcaaggccaaagtgaccatcgactgggacagaagcaccaacaccgcctacctgcagctgagcggactgacatctggcgataccgccgtgtactactgtgccaagggcagcaagcaccggctgagagattacgccctgtacgacgatgacggcgccctgaattgggccgtcgatgtggactacctgagcaacctggaattctggggccagggaacagccgtgacagtgtcttccggcggaggtggaagtggtggcggcggatctggcggcggtgggtccggaggtggtggatctgaacctaagagcagcgacaagacccacacctgtcctccatgtcctgctccagaactgctggccggaccttccgtgttcctgtttcctccaaagcctaaggacaccctgatgatcagcagaacccctgaagtgacctgcgtggtggtggatgtgtctcacgaggaccctgaagtgaagttcaattggtacgtggacggcgtggaagtgcacaacgccaagaccaagcctagagaggaacagtacaacagcacctacagagtggtgtccgtgctgaccgtgctgcaccaggattggctgaacggcaaagagtacaagtgcaaggtgtccaacaaggccctgcctgcccctatcgaaaagaccatcagcaaggccaagggccagcctagggaaccccaggtttacaccctgcctccatgccgcgacgaactgaccaagaaccaggtgtccctgtggtgcctggtcaagggcttctacccttccgatatcgccgtggaatgggagagcaatggccagcctgagaacaactacaagacaacccctcctgtgctggacagcgacggctcattcttcctgtacagcaagctgacagtggacaagagcagatggcagcagggcaacgtgttcagctgcagcgtgctgcatgaagccctgcacagccactacacccagaagtccctgtctctgagccccggcaagtgataa

SEQ ID NO: 649 - DNA, 1653 bp, synthetic construct
  source 1..1653: mol_type = other DNA
atggattggatctggcgcatcctgtttctcgtgggagctgccacaggcgcccacagcgattttgtgctgacacagtctccccacagcctgagcgttacacctggcgagtctgccagcatcagctgcaagtctagccactctctgatccacggcgaccggaacaactacctggcttggtacgtgcagaagcccggcagatctcctcagctgctgatctacctggccagcagcagagcttctggcgtgcccgatagattttctggcagcggcagcgacaaggacttcaccctgaagatctccagagtggaaaccgaggacgtgggcacctactactgtatgcagggcagagagagcccctggacatttggccagggcaccaaggtggacatcaaaggcggcggaggaagcggaggcggaggttctggtggtggtggctctggtggcggaggctcaggcggtggcggatctcaagttcatctgacacagagcggccctgaagtgcggaagcctggcacaagcgtgaaggtgtcctgtaaagcccctggcaacaccctgaaaacctacgacctgcactgggtccgatctgtgcctggacagggactgcaatggatgggctggattagccacgagggcgacaagaaagtgatcgtggaacggttcaaggccaaagtgaccatcgactgggacagaagcaccaacaccgcctacctgcagctgagcggactgacatctggcgataccgccgtgtactactgtgccaagggcagcaagcaccggctgagagattacgccctgtacgacgatgacggcgccctgaattgggccgtcgatgtggactacctgagcaacctggaattctggggccagggaacagccgtgacagtgtcttccggcggaggtggaagtggtggcggcggatctggcggcggtgggtccggaggtggtggatctgaacctaagagcagcgacaagacccacacctgtcctccatgtcctgctccagaactgctgggcggaccttccgtgttcctgtttcctccaaagcctaaggacaccctgatgatcagcagaacccctgaagtgacctgcgtggtggtggatgtgtctcacgaggaccctgaagtgaagttcaattggtacgtggacggcgtggaagtgcacaacgccaagaccaagcctagagaggaacagtacaacagcacctacagagtggtgtccgtgctgaccgtgctgcaccaggattggctgaacggcaaagagtacaagtgcaaggtgtccaacaaggccctgcctgcccctgaggaaaagaccatcagcaaggccaagggccagcctagggaaccccaggtttacaccctgcctccatgccgcgacgaactgaccaagaaccaggtgtccctgtggtgcctggtcaagggcttctacccttccgatatcgccgtggaatgggagagcaatggccagcctgagaacaactacaagacaacccctcctgtgctggacagcgacggctcattcttcctgtacagcaagctgacagtggacaagagcagatggcagcagggcaacgtgttcagctgcagcgtgctgcatgaagccctgcacagccactacacccagaagtccctgtctctgagccccggcaagtgataa

SEQ ID NO: 650 - RNA, 1638 nt, synthetic construct
  source 1..1638: mol_type = other RNA
atggattggatctggcgcatcctgtttctcgtgggagctgccacaggcgcccactctcaagttcacctgacacagtctggccccgaagtgcggaagcctggcacaagcgtgaaggtgtcctgtaaagcccctggcaacaccctgaaaacctacgacctgcactgggtccgatctgtgcctggacaaggactgcagtggatgggctggattagccacgagggcgacaagaaagtgatcgtggaacggttcaaggccaaagtgaccatcgactgggacagaagcaccaacaccgcctacctgcagctgagcggactgacatctggcgataccgccgtgtactactgtgccaagggcagcaagcaccggctgagagattacgccctgtacgacgatgacggcgccctgaattgggccgtcgatgtggactacctgagcaacctggaattctggggccagggaacagccgtgacagtgtcttccggtggcggaggaagcggaggcggaggttcaggcggcggaggctctggcggtggtggatctgattttgtgctgacacagagccctcacagcctgagcgttacacctggcgagagcgccagcatcagctgcaagtctagccactctctgatccacggcgaccggaacaactacctggcttggtacgtgcagaagcccggcagatctcctcagctgctgatctacctggccagcagcagagctagcggcgtgccagatagattttctggcagcggcagcgacaaggatttcaccctgaagatctccagagtggaaaccgaggacgtgggcacctactactgtatgcagggcagagagagcccctggacatttggccagggcaccaaggtggacatcaaaggtggcggtggttctggcggaggcggaagtggcggcggtgggtccggaggtggtggatctgaacctaagagcagcgacaagacccacacctgtcctccatgtcctgctccagaactgctcggcggaccttccgtgttcctgtttcctccaaagcctaaggacaccctgatgatcagcagaacccctgaagtgacctgcgtggtggtggatgtgtctcacgaggaccccgaagtgaagttcaattggtacgtggacggcgtggaagtgcacaacgccaagaccaagcctagagaggaacagtacaacagcacctacagagtggtgtccgtgctgacagtgctgcaccaggattggctgaacggcaaagagtacaagtgcaaggtgtccaacaaggccctgcctgctcctatcgagaaaaccatcagcaaggccaagggccagcctagggaaccccaggtttacacactgcctccaagccgcgaggaaatgaccaagaaccaggtgtccctgacctgcctcgtgaagggcttctacccttccgatatcgccgtggaatgggagagcaatggccagcctgagaacaactacaagacaacccctcctgtgctggacagcgacggctcattcttcctgtacagcaagctgactgtggataagtcccggtggcagcagggcaacgtgttcagctgttctgtgatgcacgaagccctgcacaaccactacacccagaaaagcctgtctctgagccccggcaagtgataa

SEQ ID NO: 651 - RNA, 1638 nt, synthetic construct
  source 1..1638: mol_type = other RNA
atggattggatctggcgcatcctgtttctcgtgggagctgccacaggcgcccactctcaagttcacctgacacagtctggccccgaagtgcggaagcctggcacaagcgtgaaggtgtcctgtaaagcccctggcaacaccctgaaaacctacgacctgcactgggtccgatctgtgcctggacaaggactgcagtggatgggctggattagccacgagggcgacaagaaagtgatcgtggaacggttcaaggccaaagtgaccatcgactgggacagaagcaccaacaccgcctacctgcagctgagcggactgacatctggcgataccgccgtgtactactgtgccaagggcagcaagcaccggctgagagattacgccctgtacgacgatgacggcgccctgaattgggccgtcgatgtggactacctgagcaacctggaattctggggccagggaacagccgtgacagtgtcttccggtggcggaggaagcggaggcggaggttcaggcggcggaggctctggcggtggtggatctgattttgtgctgacacagagccctcacagcctgagcgttacacctggcgagagcgccagcatcagctgcaagtctagccactctctgatccacggcgaccggaacaactacctggcttggtacgtgcagaagcccggcagatctcctcagctgctgatctacctggccagcagcagagctagcggcgtgccagatagattttctggcagcggcagcgacaaggatttcaccctgaagatctccagagtggaaaccgaggacgtgggcacctactactgtatgcagggcagagagagcccctggacatttggccagggcaccaaggtggacatcaaaggtggcggtggttctggcggaggcggaagtggcggcggtgggtccggaggtggtggatctgaacctaagagcagcgacaagacccacacctgtcctccatgtcctgctccagaactgctcggcggaccttccgtgttcctgtttcctccaaagcctaaggacaccctgatgatcagcagaacccctgaagtgacctgcgtggtggtggatgtgtctcacgaggaccccgaagtgaagttcaattggtacgtggacggcgtggaagtgcacaacgccaagaccaagcctagagaggaacagtacaacagcacctacagagtggtgtccgtgctgacagtgctgcaccaggattggctgaacggcaaagagtacaagtgcaaggtgtccaacaaggccctgcctgctcctatcgagaaaaccatcagcaaggccaagggccagcctagggaaccccaggtttacacactgcctccaagccgcgaggaaatgaccaagaaccaggtgtccctgacctgcctcgtgaagggcttctacccttccgatatcgccgtggaatgggagagcaatggccagcctgagaacaactacaagacaacccctcctgtgctggacagcgacggctcattcttcctgtacagcaagctgaccgtggacaagtccagatggcagcagggcaacgtgttcagctgtagcgtgctgcacgaagccctgcacagccactacacccagaaaagcctgtctctgagccccggcaaatgataa

SEQ ID NO: 652 - RNA, 1638 nt, synthetic construct
  source 1..1638: mol_type = other RNA
atggattggatctggcgcatcctgtttctcgtgggagctgccacaggcgcccactctcaagttcacctgacacagtctggccccgaagtgcggaagcctggcacaagcgtgaaggtgtcctgtaaagcccctggcaacaccctgaaaacctacgacctgcactgggtccgatctgtgcctggacaaggactgcagtggatgggctggattagccacgagggcgacaagaaagtgatcgtggaacggttcaaggccaaagtgaccatcgactgggacagaagcaccaacaccgcctacctgcagctgagcggactgacatctggcgataccgccgtgtactactgtgccaagggcagcaagcaccggctgagagattacgccctgtacgacgatgacggcgccctgaattgggccgtcgatgtggactacctgagcaacctggaattctggggccagggaacagccgtgacagtgtcttccggtggcggaggaagcggaggcggaggttcaggcggcggaggctctggcggtggtggatctgattttgtgctgacacagagccctcacagcctgagcgttacacctggcgagagcgccagcatcagctgcaagtctagccactctctgatccacggcgaccggaacaactacctggcttggtacgtgcagaagcccggcagatctcctcagctgctgatctacctggccagcagcagagctagcggcgtgccagatagattttctggcagcggcagcgacaaggatttcaccctgaagatctccagagtggaaaccgaggacgtgggcacctactactgtatgcagggcagagagagcccctggacatttggccagggcaccaaggtggacatcaaaggtggcggtggttctggcggaggcggaagtggcggcggtgggtccggaggtggtggatctgaacctaagagcagcgacaagacccacacctgtcctccatgtcctgctccagaactgctggccggaccttccgtgttcctgtttcctccaaagcctaaggacaccctgatgatcagcagaacccctgaagtgacctgcgtggtggtggatgtgtctcacgaggaccccgaagtgaagttcaattggtacgtggacggcgtggaagtgcacaatgccaagaccaagcctagagaggaacagtacaacagcacctacagagtggtgtccgtgctgaccgtgctgcaccaggattggctgaacggcaaagagtacaagtgcaaggtgtccaacaaggccctgcctctgcctgaggaaaagaccatcagcaaggccaagggccagcctagggaaccccaggtttacacactgcctccaagccgcgaggaaatgaccaagaaccaggtgtccctgacctgcctcgtgaagggcttctacccttccgatatcgccgtggaatgggagagcaatggccagcctgagaacaactacaagacaacccctcctgtgctggacagcgacggctcattcttcctgtacagcaagctgaccgtggacaagtccagatggcagcagggcaacgtgttcagctgtagcgtgctgcacgaagccctgcacagccactacacccagaaaagcctgtctctgagccccggcaaatgataa

SEQ ID NO: 653 - RNA, 1638 nt, synthetic construct
  source 1..1638: mol_type = other RNA
atggattggatctggcgcatcctgtttctcgtgggagctgccacaggcgcccactctcaagttcacctgacacagtctggccccgaagtgcggaagcctggcacaagcgtgaaggtgtcctgtaaagcccctggcaacaccctgaaaacctacgacctgcactgggtccgatctgtgcctggacaaggactgcagtggatgggctggattagccacgagggcgacaagaaagtgatcgtggaacggttcaaggccaaagtgaccatcgactgggacagaagcaccaacaccgcctacctgcagctgagcggactgacatctggcgataccgccgtgtactactgtgccaagggcagcaagcaccggctgagagattacgccctgtacgacgatgacggcgccctgaattgggccgtcgatgtggactacctgagcaacctggaattctggggccagggaacagccgtgacagtgtcttccggtggcggaggaagcggaggcggaggttcaggcggcggaggctctggcggtggtggatctgattttgtgctgacacagagccctcacagcctgagcgttacacctggcgagagcgccagcatcagctgcaagtctagccactctctgatccacggcgaccggaacaactacctggcttggtacgtgcagaagcccggcagatctcctcagctgctgatctacctggccagcagcagagctagcggcgtgccagatagattttctggcagcggcagcgacaaggatttcaccctgaagatctccagagtggaaaccgaggacgtgggcacctactactgtatgcagggcagagagagcccctggacatttggccagggcaccaaggtggacatcaaaggtggcggtggttctggcggaggcggaagtggcggcggtgggtccggaggtggtggatctgaacctaagagcagcgacaagacccacacctgtcctccatgtcctgctccagaactgctggccggaccttccgtgttcctgtttcctccaaagcctaaggacaccctgatgatcagcagaacccctgaagtgacctgcgtggtggtggatgtgtctcacgaggaccctgaagtgaagttcaattggtacgtggacggcgtggaagtgcacaacgccaagaccaagcctagagaggaacagtacaacagcacctacagagtggtgtccgtgctgaccgtgctgcaccaggattggctgaacggcaaagagtacaagtgcaaggtgtccaacaaggccctgcctgcccctgaggaaaagaccatcagcaaggccaagggccagcctagggaaccccaggtttacacactgcctccaagccgcgaggaaatgaccaagaaccaggtgtccctgacctgcctcgtgaagggcttctacccttccgatatcgccgtggaatgggagagcaatggccagcctgagaacaactacaagacaacccctcctgtgctggacagcgacggctcattcttcctgtacagcaagctgaccgtggacaagtccagatggcagcagggcaacgtgttcagctgtagcgtgctgcacgaagccctgcacagccactacacccagaaaagcctgtctctgagccccggcaaatgataa

SEQ ID NO: 654 - RNA, 1638 nt, synthetic construct
  source 1..1638: mol_type = other RNA
atggattggatctggcgcatcctgtttctcgtgggagctgccacaggcgcccactctcaagttcacctgacacagtctggccccgaagtgcggaagcctggcacaagcgtgaaggtgtcctgtaaagcccctggcaacaccctgaaaacctacgacctgcactgggtccgatctgtgcctggacaaggactgcagtggatgggctggattagccacgagggcgacaagaaagtgatcgtggaacggttcaaggccaaagtgaccatcgactgggacagaagcaccaacaccgcctacctgcagctgagcggactgacatctggcgataccgccgtgtactactgtgccaagggcagcaagcaccggctgagagattacgccctgtacgacgatgacggcgccctgaattgggccgtcgatgtggactacctgagcaacctggaattctggggccagggaacagccgtgacagtgtcttccggtggcggaggaagcggaggcggaggttcaggcggcggaggctctggcggtggtggatctgattttgtgctgacacagagccctcacagcctgagcgttacacctggcgagagcgccagcatcagctgcaagtctagccactctctgatccacggcgaccggaacaactacctggcttggtacgtgcagaagcccggcagatctcctcagctgctgatctacctggccagcagcagagctagcggcgtgccagatagattttctggcagcggcagcgacaaggatttcaccctgaagatctccagagtggaaaccgaggacgtgggcacctactactgtatgcagggcagagagagcccctggacatttggccagggcaccaaggtggacatcaaaggtggcggtggttctggcggaggcggaagtggcggcggtgggtccggaggtggtggatctgaacctaagagcagcgacaagacccacacctgtcctccatgtcctgctccagaactgctggccggaccttccgtgttcctgtttcctccaaagcctaaggacaccctgatgatcagcagaacccctgaagtgacctgcgtggtggtggatgtgtctcacgaggaccctgaagtgaagttcaattggtacgtggacggcgtggaagtgcacaacgccaagaccaagcctagagaggaacagtacaacagcacctacagagtggtgtccgtgctgaccgtgctgcaccaggattggctgaacggcaaagagtacaagtgcaaggtgtccaacaaggccctgcctgcccctatcgaaaagaccatcagcaaggccaagggccagcctagggaaccccaggtttacacactgcctccaagccgcgaggaaatgaccaagaaccaggtgtccctgacctgcctcgtgaagggcttctacccttccgatatcgccgtggaatgggagagcaatggccagcctgagaacaactacaagacaacccctcctgtgctggacagcgacggctcattcttcctgtacagcaagctgaccgtggacaagtccagatggcagcagggcaacgtgttcagctgtagcgtgctgcacgaagccctgcacagccactacacccagaaaagcctgtctctgagccccggcaaatgataa

SEQ ID NO: 655 - RNA, 1638 nt, synthetic construct
  source 1..1638: mol_type = other RNA
atggattggatctggcgcatcctgtttctcgtgggagctgccacaggcgcccactctcaagttcacctgacacagtctggccccgaagtgcggaagcctggcacaagcgtgaaggtgtcctgtaaagcccctggcaacaccctgaaaacctacgacctgcactgggtccgatctgtgcctggacaaggactgcagtggatgggctggattagccacgagggcgacaagaaagtgatcgtggaacggttcaaggccaaagtgaccatcgactgggacagaagcaccaacaccgcctacctgcagctgagcggactgacatctggcgataccgccgtgtactactgtgccaagggcagcaagcaccggctgagagattacgccctgtacgacgatgacggcgccctgaattgggccgtcgatgtggactacctgagcaacctggaattctggggccagggaacagccgtgacagtgtcttccggtggcggaggaagcggaggcggaggttcaggcggcggaggctctggcggtggtggatctgattttgtgctgacacagagccctcacagcctgagcgttacacctggcgagagcgccagcatcagctgcaagtctagccactctctgatccacggcgaccggaacaactacctggcttggtacgtgcagaagcccggcagatctcctcagctgctgatctacctggccagcagcagagctagcggcgtgccagatagattttctggcagcggcagcgacaaggatttcaccctgaagatctccagagtggaaaccgaggacgtgggcacctactactgtatgcagggcagagagagcccctggacatttggccagggcaccaaggtggacatcaaaggtggcggtggttctggcggaggcggaagtggcggcggtgggtccggaggtggtggatctgaacctaagagcagcgacaagacccacacctgtcctccatgtcctgctccagaactgctgggcggaccttccgtgttcctgtttcctccaaagcctaaggacaccctgatgatcagcagaacccctgaagtgacctgcgtggtggtggatgtgtctcacgaggaccctgaagtgaagttcaattggtacgtggacggcgtggaagtgcacaacgccaagaccaagcctagagaggaacagtacaacagcacctacagagtggtgtccgtgctgaccgtgctgcaccaggattggctgaacggcaaagagtacaagtgcaaggtgtccaacaaggccctgcctgcccctgaggaaaagaccatcagcaaggccaagggccagcctagggaaccccaggtttacacactgcctccaagccgcgaggaaatgaccaagaaccaggtgtccctgacctgcctcgtgaagggcttctacccttccgatatcgccgtggaatgggagagcaatggccagcctgagaacaactacaagacaacccctcctgtgctggacagcgacggctcattcttcctgtacagcaagctgaccgtggacaagtccagatggcagcagggcaacgtgttcagctgtagcgtgctgcacgaagccctgcacagccactacacccagaaaagcctgtctctgagccccggcaaatgataa

SEQ ID NO: 656 - RNA, 1638 nt, synthetic construct
  source 1..1638: mol_type = other RNA
atggattggatctggcgcatcctgtttctcgtgggagctgccacaggcgcccactctcaagttcacctgacacagtctggccccgaagtgcggaagcctggcacaagcgtgaaggtgtcctgtaaagcccctggcaacaccctgaaaacctacgacctgcactgggtccgatctgtgcctggacaaggactgcagtggatgggctggattagccacgagggcgacaagaaagtgatcgtggaacggttcaaggccaaagtgaccatcgactgggacagaagcaccaacaccgcctacctgcagctgagcggactgacatctggcgataccgccgtgtactactgtgccaagggcagcaagcaccggctgagagattacgccctgtacgacgatgacggcgccctgaattgggccgtcgatgtggactacctgagcaacctggaattctggggccagggaacagccgtgacagtgtcttccggtggcggaggaagcggaggcggaggttcaggcggcggaggctctggcggtggtggatctgattttgtgctgacacagagccctcacagcctgagcgttacacctggcgagagcgccagcatcagctgcaagtctagccactctctgatccacggcgaccggaacaactacctggcttggtacgtgcagaagcccggcagatctcctcagctgctgatctacctggccagcagcagagctagcggcgtgccagatagattttctggcagcggcagcgacaaggatttcaccctgaagatctccagagtggaaaccgaggacgtgggcacctactactgtatgcagggcagagagagcccctggacatttggccagggcaccaaggtggacatcaaaggtggcggtggttctggcggaggcggaagtggcggcggtgggtccggaggtggtggatctgaacctaagagcagcgacaagacccacacctgtcctccatgtcctgctccagaactgctcggcggaccttccgtgttcctgtttcctccaaagcctaaggacaccctgatgatcagcagaacccctgaagtgacctgcgtggtggtggatgtgtctcacgaggaccccgaagtgaagttcaattggtacgtggacggcgtggaagtgcacaacgccaagaccaagcctagagaggaacagtacaacagcacctacagagtggtgtccgtgctgacagtgctgcaccaggattggctgaacggcaaagagtacaagtgcaaggtgtccaacaaggccctgcctgctcctatcgagaaaaccatcagcaaggccaagggccagcctagggaaccccaagtctgtacactgcctcctagccgcgaggaaatgaccaagaaccaggtgtccctgagctgcgccgtgaagggcttttacccttccgatatcgccgtggaatgggagagcaatggccagcctgagaacaactacaagacaacccctcctgtgctggacagcgacggctcattcttcctggtgtccaagctgacagtggacaagagcagatggcagcagggcaacgtgttcagctgctctgtgctgcacgaagccctgcacagccactacacccagaagtccctgtctctgagccccggcaagtgataa

SEQ ID NO: 657 - RNA, 1638 nt, synthetic construct
  source 1..1638: mol_type = other RNA
atggattggatctggcgcatcctgtttctcgtgggagctgccacaggcgcccactctcaagttcacctgacacagtctggccccgaagtgcggaagcctggcacaagcgtgaaggtgtcctgtaaagcccctggcaacaccctgaaaacctacgacctgcactgggtccgatctgtgcctggacaaggactgcagtggatgggctggattagccacgagggcgacaagaaagtgatcgtggaacggttcaaggccaaagtgaccatcgactgggacagaagcaccaacaccgcctacctgcagctgagcggactgacatctggcgataccgccgtgtactactgtgccaagggcagcaagcaccggctgagagattacgccctgtacgacgatgacggcgccctgaattgggccgtcgatgtggactacctgagcaacctggaattctggggccagggaacagccgtgacagtgtcttccggtggcggaggaagcggaggcggaggttcaggcggcggaggctctggcggtggtggatctgattttgtgctgacacagagccctcacagcctgagcgttacacctggcgagagcgccagcatcagctgcaagtctagccactctctgatccacggcgaccggaacaactacctggcttggtacgtgcagaagcccggcagatctcctcagctgctgatctacctggccagcagcagagctagcggcgtgccagatagattttctggcagcggcagcgacaaggatttcaccctgaagatctccagagtggaaaccgaggacgtgggcacctactactgtatgcagggcagagagagcccctggacatttggccagggcaccaaggtggacatcaaaggtggcggtggttctggcggaggcggaagtggcggcggtgggtccggaggtggtggatctgaacctaagagcagcgacaagacccacacctgtcctccatgtcctgctccagaactgctggccggaccttccgtgttcctgtttcctccaaagcctaaggacaccctgatgatcagcagaacccctgaagtgacctgcgtggtggtggatgtgtctcacgaggaccccgaagtgaagttcaattggtacgtggacggcgtggaagtgcacaatgccaagaccaagcctagagaggaacagtacaacagcacctacagagtggtgtccgtgctgaccgtgctgcaccaggattggctgaacggcaaagagtacaagtgcaaggtgtccaacaaggccctgcctctgcctgaggaaaagaccatcagcaaggccaagggccagcctagggaaccccaagtctgtacactgcctcctagccgcgaggaaatgaccaagaaccaggtgtccctgagctgcgccgtgaagggcttttacccttccgatatcgccgtggaatgggagagcaatggccagcctgagaacaactacaagacaacccctcctgtgctggacagcgacggctcattcttcctggtgtccaagctgacagtggacaagagcagatggcagcagggcaacgtgttcagctgctctgtgctgcacgaagccctgcacagccactacacccagaagtccctgtctctgagccccggcaagtgataa

SEQ ID NO: 658 - RNA, 1638 nt, synthetic construct
  source 1..1638: mol_type = other RNA
atggattggatctggcgcatcctgtttctcgtgggagctgccacaggcgcccactctcaagttcacctgacacagtctggccccgaagtgcggaagcctggcacaagcgtgaaggtgtcctgtaaagcccctggcaacaccctgaaaacctacgacctgcactgggtccgatctgtgcctggacaaggactgcagtggatgggctggattagccacgagggcgacaagaaagtgatcgtggaacggttcaaggccaaagtgaccatcgactgggacagaagcaccaacaccgcctacctgcagctgagcggactgacatctggcgataccgccgtgtactactgtgccaagggcagcaagcaccggctgagagattacgccctgtacgacgatgacggcgccctgaattgggccgtcgatgtggactacctgagcaacctggaattctggggccagggaacagccgtgacagtgtcttccggtggcggaggaagcggaggcggaggttcaggcggcggaggctctggcggtggtggatctgattttgtgctgacacagagccctcacagcctgagcgttacacctggcgagagcgccagcatcagctgcaagtctagccactctctgatccacggcgaccggaacaactacctggcttggtacgtgcagaagcccggcagatctcctcagctgctgatctacctggccagcagcagagctagcggcgtgccagatagattttctggcagcggcagcgacaaggatttcaccctgaagatctccagagtggaaaccgaggacgtgggcacctactactgtatgcagggcagagagagcccctggacatttggccagggcaccaaggtggacatcaaaggtggcggtggttctggcggaggcggaagtggcggcggtgggtccggaggtggtggatctgaacctaagagcagcgacaagacccacacctgtcctccatgtcctgctccagaactgctggccggaccttccgtgttcctgtttcctccaaagcctaaggacaccctgatgatcagcagaacccctgaagtgacctgcgtggtggtggatgtgtctcacgaggaccctgaagtgaagttcaattggtacgtggacggcgtggaagtgcacaacgccaagaccaagcctagagaggaacagtacaacagcacctacagagtggtgtccgtgctgaccgtgctgcaccaggattggctgaacggcaaagagtacaagtgcaaggtgtccaacaaggccctgcctgcccctgaggaaaagaccatcagcaaggccaagggccagcctagggaaccccaagtctgtacactgcctcctagccgcgaggaaatgaccaagaaccaggtgtccctgagctgcgccgtgaagggcttttacccttccgatatcgccgtggaatgggagagcaatggccagcctgagaacaactacaagacaacccctcctgtgctggacagcgacggctcattcttcctggtgtccaagctgacagtggacaagagcagatggcagcagggcaacgtgttcagctgctctgtgctgcacgaagccctgcacagccactacacccagaagtccctgtctctgagccccggcaagtgataa

SEQ ID NO: 659 - RNA, 1638 nt, synthetic construct
  source 1..1638: mol_type = other RNA
atggattggatctggcgcatcctgtttctcgtgggagctgccacaggcgcccactctcaagttcacctgacacagtctggccccgaagtgcggaagcctggcacaagcgtgaaggtgtcctgtaaagcccctggcaacaccctgaaaacctacgacctgcactgggtccgatctgtgcctggacaaggactgcagtggatgggctggattagccacgagggcgacaagaaagtgatcgtggaacggttcaaggccaaagtgaccatcgactgggacagaagcaccaacaccgcctacctgcagctgagcggactgacatctggcgataccgccgtgtactactgtgccaagggcagcaagcaccggctgagagattacgccctgtacgacgatgacggcgccctgaattgggccgtcgatgtggactacctgagcaacctggaattctggggccagggaacagccgtgacagtgtcttccggtggcggaggaagcggaggcggaggttcaggcggcggaggctctggcggtggtggatctgattttgtgctgacacagagccctcacagcctgagcgttacacctggcgagagcgccagcatcagctgcaagtctagccactctctgatccacggcgaccggaacaactacctggcttggtacgtgcagaagcccggcagatctcctcagctgctgatctacctggccagcagcagagctagcggcgtgccagatagattttctggcagcggcagcgacaaggatttcaccctgaagatctccagagtggaaaccgaggacgtgggcacctactactgtatgcagggcagagagagcccctggacatttggccagggcaccaaggtggacatcaaaggtggcggtggttctggcggaggcggaagtggcggcggtgggtccggaggtggtggatctgaacctaagagcagcgacaagacccacacctgtcctccatgtcctgctccagaactgctggccggaccttccgtgttcctgtttcctccaaagcctaaggacaccctgatgatcagcagaacccctgaagtgacctgcgtggtggtggatgtgtctcacgaggaccctgaagtgaagttcaattggtacgtggacggcgtggaagtgcacaacgccaagaccaagcctagagaggaacagtacaacagcacctacagagtggtgtccgtgctgaccgtgctgcaccaggattggctgaacggcaaagagtacaagtgcaaggtgtccaacaaggccctgcctgcccctatcgaaaagaccatcagcaaggccaagggccagcctagggaaccccaagtctgtacactgcctcctagccgcgaggaaatgaccaagaaccaggtgtccctgagctgcgccgtgaagggcttttacccttccgatatcgccgtggaatgggagagcaatggccagcctgagaacaactacaagacaacccctcctgtgctggacagcgacggctcattcttcctggtgtccaagctgacagtggacaagagcagatggcagcagggcaacgtgttcagctgctctgtgctgcacgaagccctgcacagccactacacccagaagtccctgtctctgagccccggcaagtgataa

SEQ ID NO: 660 - RNA, 1638 nt, synthetic construct
  source 1..1638: mol_type = other RNA
atggattggatctggcgcatcctgtttctcgtgggagctgccacaggcgcccactctcaagttcacctgacacagtctggccccgaagtgcggaagcctggcacaagcgtgaaggtgtcctgtaaagcccctggcaacaccctgaaaacctacgacctgcactgggtccgatctgtgcctggacaaggactgcagtggatgggctggattagccacgagggcgacaagaaagtgatcgtggaacggttcaaggccaaagtgaccatcgactgggacagaagcaccaacaccgcctacctgcagctgagcggactgacatctggcgataccgccgtgtactactgtgccaagggcagcaagcaccggctgagagattacgccctgtacgacgatgacggcgccctgaattgggccgtcgatgtggactacctgagcaacctggaattctggggccagggaacagccgtgacagtgtcttccggtggcggaggaagcggaggcggaggttcaggcggcggaggctctggcggtggtggatctgattttgtgctgacacagagccctcacagcctgagcgttacacctggcgagagcgccagcatcagctgcaagtctagccactctctgatccacggcgaccggaacaactacctggcttggtacgtgcagaagcccggcagatctcctcagctgctgatctacctggccagcagcagagctagcggcgtgccagatagattttctggcagcggcagcgacaaggatttcaccctgaagatctccagagtggaaaccgaggacgtgggcacctactactgtatgcagggcagagagagcccctggacatttggccagggcaccaaggtggacatcaaaggtggcggtggttctggcggaggcggaagtggcggcggtgggtccggaggtggtggatctgaacctaagagcagcgacaagacccacacctgtcctccatgtcctgctccagaactgctgggcggaccttccgtgttcctgtttcctccaaagcctaaggacaccctgatgatcagcagaacccctgaagtgacctgcgtggtggtggatgtgtctcacgaggaccctgaagtgaagttcaattggtacgtggacggcgtggaagtgcacaacgccaagaccaagcctagagaggaacagtacaacagcacctacagagtggtgtccgtgctgaccgtgctgcaccaggattggctgaacggcaaagagtacaagtgcaaggtgtccaacaaggccctgcctgcccctgaggaaaagaccatcagcaaggccaagggccagcctagggaaccccaagtctgtacactgcctcctagccgcgaggaaatgaccaagaaccaggtgtccctgagctgcgccgtgaagggcttttacccttccgatatcgccgtggaatgggagagcaatggccagcctgagaacaactacaagacaacccctcctgtgctggacagcgacggctcattcttcctggtgtccaagctgacagtggacaagagcagatggcagcagggcaacgtgttcagctgctctgtgctgcacgaagccctgcacagccactacacccagaagtccctgtctctgagccccggcaagtgataa

SEQ ID NO: 661 - RNA, 1638 nt, synthetic construct
  source 1..1638: mol_type = other RNA
atggattggatctggcgcatcctgtttctcgtgggagctgccacaggcgcccactctcaagttcacctgacacagtctggccccgaagtgcggaagcctggcacaagcgtgaaggtgtcctgtaaagcccctggcaacaccctgaaaacctacgacctgcactgggtccgatctgtgcctggacaaggactgcagtggatgggctggattagccacgagggcgacaagaaagtgatcgtggaacggttcaaggccaaagtgaccatcgactgggacagaagcaccaacaccgcctacctgcagctgagcggactgacatctggcgataccgccgtgtactactgtgccaagggcagcaagcaccggctgagagattacgccctgtacgacgatgacggcgccctgaattgggccgtcgatgtggactacctgagcaacctggaattctggggccagggaacagccgtgacagtgtcttccggtggcggaggaagcggaggcggaggttcaggcggcggaggctctggcggtggtggatctgattttgtgctgacacagagccctcacagcctgagcgttacacctggcgagagcgccagcatcagctgcaagtctagccactctctgatccacggcgaccggaacaactacctggcttggtacgtgcagaagcccggcagatctcctcagctgctgatctacctggccagcagcagagctagcggcgtgccagatagattttctggcagcggcagcgacaaggatttcaccctgaagatctccagagtggaaaccgaggacgtgggcacctactactgtatgcagggcagagagagcccctggacatttggccagggcaccaaggtggacatcaaaggtggcggtggttctggcggaggcggaagtggcggcggtgggtccggaggtggtggatctgaacctaagagcagcgacaagacccacacctgtcctccatgtcctgctccagaactgctcggcggaccttccgtgttcctgtttcctccaaagcctaaggacaccctgatgatcagcagaacccctgaagtgacctgcgtggtggtggatgtgtctcacgaggaccccgaagtgaagttcaattggtacgtggacggcgtggaagtgcacaacgccaagaccaagcctagagaggaacagtacaacagcacctacagagtggtgtccgtgctgacagtgctgcaccaggattggctgaacggcaaagagtacaagtgcaaggtgtccaacaaggccctgcctgctcctatcgagaaaaccatcagcaaggccaagggccagcctagggaaccccaggtttacaccctgcctccatgccgcgaggaaatgaccaagaaccaggtgtccctgtggtgcctcgtgaagggcttctacccttccgatatcgccgtggaatgggagagcaatggccagcctgagaacaactacaagacaacccctcctgtgctggacagcgacggctcattcttcctgtacagcaagctgaccgtggacaagtccagatggcagcagggcaacgtgttcagctgtagcgtgctgcacgaagccctgcacagccactacacccagaagtccctgtctctgagccccggcaagtgataa

SEQ ID NO: 662 - RNA, 1638 nt, synthetic construct
  source 1..1638: mol_type = other RNA
atggattggatctggcgcatcctgtttctcgtgggagctgccacaggcgcccactctcaagttcacctgacacagtctggccccgaagtgcggaagcctggcacaagcgtgaaggtgtcctgtaaagcccctggcaacaccctgaaaacctacgacctgcactgggtccgatctgtgcctggacaaggactgcagtggatgggctggattagccacgagggcgacaagaaagtgatcgtggaacggttcaaggccaaagtgaccatcgactgggacagaagcaccaacaccgcctacctgcagctgagcggactgacatctggcgataccgccgtgtactactgtgccaagggcagcaagcaccggctgagagattacgccctgtacgacgatgacggcgccctgaattgggccgtcgatgtggactacctgagcaacctggaattctggggccagggaacagccgtgacagtgtcttccggtggcggaggaagcggaggcggaggttcaggcggcggaggctctggcggtggtggatctgattttgtgctgacacagagccctcacagcctgagcgttacacctggcgagagcgccagcatcagctgcaagtctagccactctctgatccacggcgaccggaacaactacctggcttggtacgtgcagaagcccggcagatctcctcagctgctgatctacctggccagcagcagagctagcggcgtgccagatagattttctggcagcggcagcgacaaggatttcaccctgaagatctccagagtggaaaccgaggacgtgggcacctactactgtatgcagggcagagagagcccctggacatttggccagggcaccaaggtggacatcaaaggtggcggtggttctggcggaggcggaagtggcggcggtgggtccggaggtggtggatctgaacctaagagcagcgacaagacccacacctgtcctccatgtcctgctccagaactgctggccggaccttccgtgttcctgtttcctccaaagcctaaggacaccctgatgatcagcagaacccctgaagtgacctgcgtggtggtggatgtgtctcacgaggaccccgaagtgaagttcaattggtacgtggacggcgtggaagtgcacaatgccaagaccaagcctagagaggaacagtacaacagcacctacagagtggtgtccgtgctgaccgtgctgcaccaggattggctgaacggcaaagagtacaagtgcaaggtgtccaacaaggccctgcctctgcctgaggaaaagaccatcagcaaggccaagggccagcctagggaaccccaggtttacaccctgcctccatgccgcgaggaaatgaccaagaaccaggtgtccctgtggtgcctcgtgaagggcttctacccttccgatatcgccgtggaatgggagagcaatggccagcctgagaacaactacaagacaacccctcctgtgctggacagcgacggctcattcttcctgtacagcaagctgaccgtggacaagtccagatggcagcagggcaacgtgttcagctgtagcgtgctgcacgaagccctgcacagccactacacccagaagtccctgtctctgagccccggcaagtgataa

SEQ ID NO: 663 - RNA, 1638 nt, synthetic construct
  source 1..1638: mol_type = other RNA
atggattggatctggcgcatcctgtttctcgtgggagctgccacaggcgcccactctcaagttcacctgacacagtctggccccgaagtgcggaagcctggcacaagcgtgaaggtgtcctgtaaagcccctggcaacaccctgaaaacctacgacctgcactgggtccgatctgtgcctggacaaggactgcagtggatgggctggattagccacgagggcgacaagaaagtgatcgtggaacggttcaaggccaaagtgaccatcgactgggacagaagcaccaacaccgcctacctgcagctgagcggactgacatctggcgataccgccgtgtactactgtgccaagggcagcaagcaccggctgagagattacgccctgtacgacgatgacggcgccctgaattgggccgtcgatgtggactacctgagcaacctggaattctggggccagggaacagccgtgacagtgtcttccggtggcggaggaagcggaggcggaggttcaggcggcggaggctctggcggtggtggatctgattttgtgctgacacagagccctcacagcctgagcgttacacctggcgagagcgccagcatcagctgcaagtctagccactctctgatccacggcgaccggaacaactacctggcttggtacgtgcagaagcccggcagatctcctcagctgctgatctacctggccagcagcagagctagcggcgtgccagatagattttctggcagcggcagcgacaaggatttcaccctgaagatctccagagtggaaaccgaggacgtgggcacctactactgtatgcagggcagagagagcccctggacatttggccagggcaccaaggtggacatcaaaggtggcggtggttctggcggaggcggaagtggcggcggtgggtccggaggtggtggatctgaacctaagagcagcgacaagacccacacctgtcctccatgtcctgctccagaactgctggccggaccttccgtgttcctgtttcctccaaagcctaaggacaccctgatgatcagcagaacccctgaagtgacctgcgtggtggtggatgtgtctcacgaggaccctgaagtgaagttcaattggtacgtggacggcgtggaagtgcacaacgccaagaccaagcctagagaggaacagtacaacagcacctacagagtggtgtccgtgctgaccgtgctgcaccaggattggctgaacggcaaagagtacaagtgcaaggtgtccaacaaggccctgcctgcccctgaggaaaagaccatcagcaaggccaagggccagcctagggaaccccaggtttacaccctgcctccatgccgcgaggaaatgaccaagaaccaggtgtccctgtggtgcctcgtgaagggcttctacccttccgatatcgccgtggaatgggagagcaatggccagcctgagaacaactacaagacaacccctcctgtgctggacagcgacggctcattcttcctgtacagcaagctgaccgtggacaagtccagatggcagcagggcaacgtgttcagctgtagcgtgctgcacgaagccctgcacagccactacacccagaagtccctgtctctgagccccggcaagtgataa

SEQ ID NO: 664 - RNA, 1638 nt, synthetic construct
  source 1..1638: mol_type = other RNA
atggattggatctggcgcatcctgtttctcgtgggagctgccacaggcgcccactctcaagttcacctgacacagtctggccccgaagtgcggaagcctggcacaagcgtgaaggtgtcctgtaaagcccctggcaacaccctgaaaacctacgacctgcactgggtccgatctgtgcctggacaaggactgcagtggatgggctggattagccacgagggcgacaagaaagtgatcgtggaacggttcaaggccaaagtgaccatcgactgggacagaagcaccaacaccgcctacctgcagctgagcggactgacatctggcgataccgccgtgtactactgtgccaagggcagcaagcaccggctgagagattacgccctgtacgacgatgacggcgccctgaattgggccgtcgatgtggactacctgagcaacctggaattctggggccagggaacagccgtgacagtgtcttccggtggcggaggaagcggaggcggaggttcaggcggcggaggctctggcggtggtggatctgattttgtgctgacacagagccctcacagcctgagcgttacacctggcgagagcgccagcatcagctgcaagtctagccactctctgatccacggcgaccggaacaactacctggcttggtacgtgcagaagcccggcagatctcctcagctgctgatctacctggccagcagcagagctagcggcgtgccagatagattttctggcagcggcagcgacaaggatttcaccctgaagatctccagagtggaaaccgaggacgtgggcacctactactgtatgcagggcagagagagcccctggacatttggccagggcaccaaggtggacatcaaaggtggcggtggttctggcggaggcggaagtggcggcggtgggtccggaggtggtggatctgaacctaagagcagcgacaagacccacacctgtcctccatgtcctgctccagaactgctggccggaccttccgtgttcctgtttcctccaaagcctaaggacaccctgatgatcagcagaacccctgaagtgacctgcgtggtggtggatgtgtctcacgaggaccctgaagtgaagttcaattggtacgtggacggcgtggaagtgcacaacgccaagaccaagcctagagaggaacagtacaacagcacctacagagtggtgtccgtgctgaccgtgctgcaccaggattggctgaacggcaaagagtacaagtgcaaggtgtccaacaaggccctgcctgcccctatcgaaaagaccatcagcaaggccaagggccagcctagggaaccccaggtttacaccctgcctccatgccgcgaggaaatgaccaagaaccaggtgtccctgtggtgcctcgtgaagggcttctacccttccgatatcgccgtggaatgggagagcaatggccagcctgagaacaactacaagacaacccctcctgtgctggacagcgacggctcattcttcctgtacagcaagctgaccgtggacaagtccagatggcagcagggcaacgtgttcagctgtagcgtgctgcacgaagccctgcacagccactacacccagaagtccctgtctctgagccccggcaagtgataa

SEQ ID NO: 665 - RNA, 1638 nt, synthetic construct
  source 1..1638: mol_type = other RNA
atggattggatctggcgcatcctgtttctcgtgggagctgccacaggcgcccactctcaagttcacctgacacagtctggccccgaagtgcggaagcctggcacaagcgtgaaggtgtcctgtaaagcccctggcaacaccctgaaaacctacgacctgcactgggtccgatctgtgcctggacaaggactgcagtggatgggctggattagccacgagggcgacaagaaagtgatcgtggaacggttcaaggccaaagtgaccatcgactgggacagaagcaccaacaccgcctacctgcagctgagcggactgacatctggcgataccgccgtgtactactgtgccaagggcagcaagcaccggctgagagattacgccctgtacgacgatgacggcgccctgaattgggccgtcgatgtggactacctgagcaacctggaattctggggccagggaacagccgtgacagtgtcttccggtggcggaggaagcggaggcggaggttcaggcggcggaggctctggcggtggtggatctgattttgtgctgacacagagccctcacagcctgagcgttacacctggcgagagcgccagcatcagctgcaagtctagccactctctgatccacggcgaccggaacaactacctggcttggtacgtgcagaagcccggcagatctcctcagctgctgatctacctggccagcagcagagctagcggcgtgccagatagattttctggcagcggcagcgacaaggatttcaccctgaagatctccagagtggaaaccgaggacgtgggcacctactactgtatgcagggcagagagagcccctggacatttggccagggcaccaaggtggacatcaaaggtggcggtggttctggcggaggcggaagtggcggcggtgggtccggaggtggtggatctgaacctaagagcagcgacaagacccacacctgtcctccatgtcctgctccagaactgctgggcggaccttccgtgttcctgtttcctccaaagcctaaggacaccctgatgatcagcagaacccctgaagtgacctgcgtggtggtggatgtgtctcacgaggaccctgaagtgaagttcaattggtacgtggacggcgtggaagtgcacaacgccaagaccaagcctagagaggaacagtacaacagcacctacagagtggtgtccgtgctgaccgtgctgcaccaggattggctgaacggcaaagagtacaagtgcaaggtgtccaacaaggccctgcctgcccctgaggaaaagaccatcagcaaggccaagggccagcctagggaaccccaggtttacaccctgcctccatgccgcgaggaaatgaccaagaaccaggtgtccctgtggtgcctcgtgaagggcttctacccttccgatatcgccgtggaatgggagagcaatggccagcctgagaacaactacaagacaacccctcctgtgctggacagcgacggctcattcttcctgtacagcaagctgaccgtggacaagtccagatggcagcagggcaacgtgttcagctgtagcgtgctgcacgaagccctgcacagccactacacccagaagtccctgtctctgagccccggcaagtgataa

SEQ ID NO: 666 - RNA, 1638 nt, synthetic construct; identical to SEQ ID NO: 650
  source 1..1638: mol_type = other RNA

SEQ ID NO: 667 - RNA, 1638 nt, synthetic construct; identical to SEQ ID NO: 651
  source 1..1638: mol_type = other RNA

SEQ ID NO: 668 - RNA, 1638 nt, synthetic construct; identical to SEQ ID NO: 652
  source 1..1638: mol_type = other RNA

SEQ ID NO: 669 - RNA, 1638 nt, synthetic construct; identical to SEQ ID NO: 653
  source 1..1638: mol_type = other RNA

SEQ ID NO: 670 - RNA, 1638 nt, synthetic construct; identical to SEQ ID NO: 654
  source 1..1638: mol_type = other RNA

SEQ ID NO: 671 - RNA, 1638 nt, synthetic construct; identical to SEQ ID NO: 655
  source 1..1638: mol_type = other RNA

SEQ ID NO: 672 - RNA, 1638 nt, synthetic construct; identical to SEQ ID NO: 656
  source 1..1638: mol_type = other RNA

SEQ ID NO: 673 - RNA, 1638 nt, synthetic construct; identical to SEQ ID NO: 657
  source 1..1638: mol_type = other RNA

SEQ ID NO: 674 - RNA, 1638 nt, synthetic construct; identical to SEQ ID NO: 658
  source 1..1638: mol_type = other RNA

SEQ ID NO: 675 - RNA, 1638 nt, synthetic construct; identical to SEQ ID NO: 659
  source 1..1638: mol_type = other RNA

SEQ ID NO: 676 - RNA, 1638 nt, synthetic construct; identical to SEQ ID NO: 660
  source 1..1638: mol_type = other RNA

SEQ ID NO: 677 - RNA, 1638 nt, synthetic construct; identical to SEQ ID NO: 661
  source 1..1638: mol_type = other RNA

SEQ ID NO: 678 - RNA, 1638 nt, synthetic construct; identical to SEQ ID NO: 662
  source 1..1638: mol_type = other RNA

SEQ ID NO: 679 - RNA, 1638 nt, synthetic construct; identical to SEQ ID NO: 663
  source 1..1638: mol_type = other RNA

SEQ ID NO: 680 - RNA, 1638 nt, synthetic construct; identical to SEQ ID NO: 664
  source 1..1638: mol_type = other RNA

SEQ ID NO: 681 - RNA, 1638 nt, synthetic construct; identical to SEQ ID NO: 665
  source 1..1638: mol_type = other RNA

SEQ ID NO: 682 - RNA, 1638 nt, synthetic construct
  source 1..1638: mol_type = other RNA
atggattggatctggcgcatcctgtttctcgtgggagctgccacaggcgcccactctcaagttcacctgacacagtctggccccgaagtgcggaagcctggcacaagcgtgaaggtgtcctgtaaagcccctggcaacaccctgaaaacctacgacctgcactgggtccgatctgtgcctggacaaggactgcagtggatgggctggattagccacgagggcgacaagaaagtgatcgtggaacggttcaaggccaaagtgaccatcgactgggacagaagcaccaacaccgcctacctgcagctgagcggactgacatctggcgataccgccgtgtactactgtgccaagggcagcaagcaccggctgagagattacgccctgtacgacgatgacggcgccctgaattgggccgtcgatgtggactacctgagcaacctggaattctggggccagggaacagccgtgacagtgtcttccggtggcggaggaagcggaggcggaggttcaggcggcggaggctctggcggtggtggatctgattttgtgctgacacagagccctcacagcctgagcgttacacctggcgagagcgccagcatcagctgcaagtctagccactctctgatccacggcgaccggaacaactacctggcttggtacgtgcagaagcccggcagatctcctcagctgctgatctacctggccagcagcagagctagcggcgtgccagatagattttctggcagcggcagcgacaaggatttcaccctgaagatctccagagtggaaaccgaggacgtgggcacctactactgtatgcagggcagagagagcccctggacatttggccagggcaccaaggtggacatcaaaggtggcggtggttctggcggaggcggaagtggcggcggtgggtccggaggtggtggatctgaacctaagagcagcgacaagacccacacctgtcctccatgtcctgctccagaactgctcggcggaccttccgtgttcctgtttcctccaaagcctaaggacaccctgatgatcagcagaacccctgaagtgacctgcgtggtggtggatgtgtctcacgaggaccccgaagtgaagttcaattggtacgtggacggcgtggaagtgcacaacgccaagaccaagcctagagaggaacagtacaacagcacctacagagtggtgtccgtgctgacagtgctgcaccaggattggctgaacggcaaagagtacaagtgcaaggtgtccaacaaggccctgcctgctcctatcgagaaaaccatcagcaaggccaagggccagcctagggaaccccaggtttacacactgcctccaagccgcgacgaactgaccaagaaccaggtgtccctgacctgcctcgtgaagggcttctacccttccgatatcgccgtggaatgggagagcaatggccagcctgagaacaactacaagacaacccctcctgtgctggacagcgacggctcattcttcctgtacagcaagctgactgtggataagtcccggtggcagcagggcaacgtgttcagctgttctgtgatgcacgaagccctgcacaaccactacacccagaaaagcctgtctctgagccccggcaagtgataa

SEQ ID NO: 683 - RNA, 1638 nt, synthetic construct
  source 1..1638: mol_type = other RNA
atggattggatctggcgcatcctgtttctcgtgggagctgccacaggcgcccactctcaagttcacctgacacagtctggccccgaagtgcggaagcctggcacaagcgtgaaggtgtcctgtaaagcccctggcaacaccctgaaaacctacgacctgcactgggtccgatctgtgcctggacaaggactgcagtggatgggctggattagccacgagggcgacaagaaagtgatcgtggaacggttcaaggccaaagtgaccatcgactgggacagaagcaccaacaccgcctacctgcagctgagcggactgacatctggcgataccgccgtgtactactgtgccaagggcagcaagcaccggctgagagattacgccctgtacgacgatgacggcgccctgaattgggccgtcgatgtggactacctgagcaacctggaattctggggccagggaacagccgtgacagtgtcttccggtggcggaggaagcggaggcggaggttcaggcggcggaggctctggcggtggtggatctgattttgtgctgacacagagccctcacagcctgagcgttacacctggcgagagcgccagcatcagctgcaagtctagccactctctgatccacggcgaccggaacaactacctggcttggtacgtgcagaagcccggcagatctcctcagctgctgatctacctggccagcagcagagctagcggcgtgccagatagattttctggcagcggcagcgacaaggatttcaccctgaagatctccagagtggaaaccgaggacgtgggcacctactactgtatgcagggcagagagagcccctggacatttggccagggcaccaaggtggacatcaaaggtggcggtggttctggcggaggcggaagtggcggcggtgggtccggaggtggtggatctgaacctaagagcagcgacaagacccacacctgtcctccatgtcctgctccagaactgctcggcggaccttccgtgttcctgtttcctccaaagcctaaggacaccctgatgatcagcagaacccctgaagtgacctgcgtggtggtggatgtgtctcacgaggaccccgaagtgaagttcaattggtacgtggacggcgtggaagtgcacaacgccaagaccaagcctagagaggaacagtacaacagcacctacagagtggtgtccgtgctgacagtgctgcaccaggattggctgaacggcaaagagtacaagtgcaaggtgtccaacaaggccctgcctgctcctatcgagaaaaccatcagcaaggccaagggccagcctagggaaccccaggtttacacactgcctccaagccgcgacgaactgaccaagaaccaggtgtccctgacctgcctcgtgaagggcttctacccttccgatatcgccgtggaatgggagagcaatggccagcctgagaacaactacaagacaacccctcctgtgctggacagcgacggctcattcttcctgtacagcaagctgaccgtggacaagtccagatggcagcagggcaacgtgttcagctgtagcgtgctgcacgaagccctgcacagccactacacccagaaaagcctgtctctgagccccggcaaatgataa

SEQ ID NO: 684 - RNA, 1638 nt, synthetic construct
  source 1..1638: mol_type = other RNA
atggattggatctggcgcatcctgtttctcgtgggagctgccacaggcgcccactctcaagttcacctgacacagtctggccccgaagtgcggaagcctggcacaagcgtgaaggtgtcctgtaaagcccctggcaacaccctgaaaacctacgacctgcactgggtccgatctgtgcctggacaaggactgcagtggatgggctggattagccacgagggcgacaagaaagtgatcgtggaacggttcaaggccaaagtgaccatcgactgggacagaagcaccaacaccgcctacctgcagctgagcggactgacatctggcgataccgccgtgtactactgtgccaagggcagcaagcaccggctgagagattacgccctgtacgacgatgacggcgccctgaattgggccgtcgatgtggactacctgagcaacctggaattctggggccagggaacagccgtgacagtgtcttccggtggcggaggaagcggaggcggaggttcaggcggcggaggctctggcggtggtggatctgattttgtgctgacacagagccctcacagcctgagcgttacacctggcgagagcgccagcatcagctgcaagtctagccactctctgatccacggcgaccggaacaactacctggcttggtacgtgcagaagcccggcagatctcctcagctgctgatctacctggccagcagcagagctagcggcgtgccagatagattttctggcagcggcagcgacaaggatttcaccctgaagatctccagagtggaaaccgaggacgtgggcacctactactgtatgcagggcagagagagcccctggacatttggccagggcaccaaggtggacatcaaaggtggcggtggttctggcggaggcggaagtggcggcggtgggtccggaggtggtggatctgaacctaagagcagcgacaagacccacacctgtcctccatgtcctgctccagaactgctggccggaccttccgtgttcctgtttcctccaaagcctaaggacaccctgatgatcagcagaacccctgaagtgacctgcgtggtggtggatgtgtctcacgaggaccccgaagtgaagttcaattggtacgtggacggcgtggaagtgcacaatgccaagaccaagcctagagaggaacagtacaacagcacctacagagtggtgtccgtgctgaccgtgctgcaccaggattggctgaacggcaaagagtacaagtgcaaggtgtccaacaaggccctgcctctgcctgaggaaaagaccatcagcaaggccaagggccagcctagggaaccccaggtttacacactgcctccaagccgcgacgaactgaccaagaaccaggtgtccctgacctgcctcgtgaagggcttctacccttccgatatcgccgtggaatgggagagcaatggccagcctgagaacaactacaagacaacccctcctgtgctggacagcgacggctcattcttcctgtacagcaagctgaccgtggacaagtccagatggcagcagggcaacgtgttcagctgtagcgtgctgcacgaagccctgcacagccactacacccagaaaagcctgtctctgagccccggcaaatgataa

SEQ ID NO: 685 - RNA, 1638 nt, synthetic construct
  source 1..1638: mol_type = other RNA
atggattggatctggcgcatcctgtttctcgtgggagctgccacaggcgcccactctcaagttcacctgacacagtctggccccgaagtgcggaagcctggcacaagcgtgaaggtgtcctgtaaagcccctggcaacaccctgaaaacctacgacctgcactgggtccgatctgtgcctggacaaggactgcagtggatgggctggattagccacgagggcgacaagaaagtgatcgtggaacggttcaaggccaaagtgaccatcgactgggacagaagcaccaacaccgcctacctgcagctgagcggactgacatctggcgataccgccgtgtactactgtgccaagggcagcaagcaccggctgagagattacgccctgtacgacgatgacggcgccctgaattgggccgtcgatgtggactacctgagcaacctggaattctggggccagggaacagccgtgacagtgtcttccggtggcggaggaagcggaggcggaggttcaggcggcggaggctctggcggtggtggatctgattttgtgctgacacagagccctcacagcctgagcgttacacctggcgagagcgccagcatcagctgcaagtctagccactctctgatccacggcgaccggaacaactacctggcttggtacgtgcagaagcccggcagatctcctcagctgctgatctacctggccagcagcagagctagcggcgtgccagatagattttctggcagcggcagcgacaaggatttcaccctgaagatctccagagtggaaaccgaggacgtgggcacctactactgtatgcagggcagagagagcccctggacatttggccagggcaccaaggtggacatcaaaggtggcggtggttctggcggaggcggaagtggcggcggtgggtccggaggtggtggatctgaacctaagagcagcgacaagacccacacctgtcctccatgtcctgctccagaactgctggccggaccttccgtgttcctgtttcctccaaagcctaaggacaccctgatgatcagcagaacccctgaagtgacctgcgtggtggtggatgtgtctcacgaggaccctgaagtgaagttcaattggtacgtggacggcgtggaagtgcacaacgccaagaccaagcctagagaggaacagtacaacagcacctacagagtggtgtccgtgctgaccgtgctgcaccaggattggctgaacggcaaagagtacaagtgcaaggtgtccaacaaggccctgcctgcccctgaggaaaagaccatcagcaaggccaagggccagcctagggaaccccaggtttacacactgcctccaagccgcgacgaactgaccaagaaccaggtgtccctgacctgcctcgtgaagggcttctacccttccgatatcgccgtggaatgggagagcaatggccagcctgagaacaactacaagacaacccctcctgtgctggacagcgacggctcattcttcctgtacagcaagctgaccgtggacaagtccagatggcagcagggcaacgtgttcagctgtagcgtgctgcacgaagccctgcacagccactacacccagaaaagcctgtctctgagccccggcaaatgataa

SEQ ID NO: 686 - RNA, 1638 nt, synthetic construct
  source 1..1638: mol_type = other RNA
atggattggatctggcgcatcctgtttctcgtgggagctgccacaggcgcccactctcaagttcacctgacacagtctggccccgaagtgcggaagcctggcacaagcgtgaaggtgtcctgtaaagcccctggcaacaccctgaaaacctacgacctgcactgggtccgatctgtgcctggacaaggactgcagtggatgggctggattagccacgagggcgacaagaaagtgatcgtggaacggttcaaggccaaagtgaccatcgactgggacagaagcaccaacaccgcctacctgcagctgagcggactgacatctggcgataccgccgtgtactactgtgccaagggcagcaagcaccggctgagagattacgccctgtacgacgatgacggcgccctgaattgggccgtcgatgtggactacctgagcaacctggaattctggggccagggaacagccgtgacagtgtcttccggtggcggaggaagcggaggcggaggttcaggcggcggaggctctggcggtggtggatctgattttgtgctgacacagagccctcacagcctgagcgttacacctggcgagagcgccagcatcagctgcaagtctagccactctctgatccacggcgaccggaacaactacctggcttggtacgtgcagaagcccggcagatctcctcagctgctgatctacctggccagcagcagagctagcggcgtgccagatagattttctggcagcggcagcgacaaggatttcaccctgaagatctccagagtggaaaccgaggacgtgggcacctactactgtatgcagggcagagagagcccctggacatttggccagggcaccaaggtggacatcaaaggtggcggtggttctggcggaggcggaagtggcggcggtgggtccggaggtggtggatctgaacctaagagcagcgacaagacccacacctgtcctccatgtcctgctccagaactgctggccggaccttccgtgttcctgtttcctccaaagcctaaggacaccctgatgatcagcagaacccctgaagtgacctgcgtggtggtggatgtgtctcacgaggaccctgaagtgaagttcaattggtacgtggacggcgtggaagtgcacaacgccaagaccaagcctagagaggaacagtacaacagcacctacagagtggtgtccgtgctgaccgtgctgcaccaggattggctgaacggcaaagagtacaagtgcaaggtgtccaacaaggccctgcctgcccctatcgaaaagaccatcagcaaggccaagggccagcctagggaaccccaggtttacacactgcctccaagccgcgacgaactgaccaagaaccaggtgtccctgacctgcctcgtgaagggcttctacccttccgatatcgccgtggaatgggagagcaatggccagcctgagaacaactacaagacaacccctcctgtgctggacagcgacggctcattcttcctgtacagcaagctgaccgtggacaagtccagatggcagcagggcaacgtgttcagctgtagcgtgctgcacgaagccctgcacagccactacacccagaaaagcctgtctctgagccccggcaaatgataa

SEQ ID NO: 687 - RNA, 1638 nt, synthetic construct
  source 1..1638: mol_type = other RNA
atggattggatctggcgcatcctgtttctcgtgggagctgccacaggcgcccactctcaagttcacctgacacagtctggccccgaagtgcggaagcctggcacaagcgtgaaggtgtcctgtaaagcccctggcaacaccctgaaaacctacgacctgcactgggtccgatctgtgcctggacaaggactgcagtggatgggctggattagccacgagggcgacaagaaagtgatcgtggaacggttcaaggccaaagtgaccatcgactgggacagaagcaccaacaccgcctacctgcagctgagcggactgacatctggcgataccgccgtgtactactgtgccaagggcagcaagcaccggctgagagattacgccctgtacgacgatgacggcgccctgaattgggccgtcgatgtggactacctgagcaacctggaattctggggccagggaacagccgtgacagtgtcttccggtggcggaggaagcggaggcggaggttcaggcggcggaggctctggcggtggtggatctgattttgtgctgacacagagccctcacagcctgagcgttacacctggcgagagcgccagcatcagctgcaagtctagccactctctgatccacggcgaccggaacaactacctggcttggtacgtgcagaagcccggcagatctcctcagctgctgatctacctggccagcagcagagctagcggcgtgccagatagattttctggcagcggcagcgacaaggatttcaccctgaagatctccagagtggaaaccgaggacgtgggcacctactactgtatgcagggcagagagagcccctggacatttggccagggcaccaaggtggacatcaaaggtggcggtggttctggcggaggcggaagtggcggcggtgggtccggaggtggtggatctgaacctaagagcagcgacaagacccacacctgtcctccatgtcctgctccagaactgctgggcggaccttccgtgttcctgtttcctccaaagcctaaggacaccctgatgatcagcagaacccctgaagtgacctgcgtggtggtggatgtgtctcacgaggaccctgaagtgaagttcaattggtacgtggacggcgtggaagtgcacaacgccaagaccaagcctagagaggaacagtacaacagcacctacagagtggtgtccgtgctgaccgtgctgcaccaggattggctgaacggcaaagagtacaagtgcaaggtgtccaacaaggccctgcctgcccctgaggaaaagaccatcagcaaggccaagggccagcctagggaaccccaggtttacacactgcctccaagccgcgacgaactgaccaagaaccaggtgtccctgacctgcctcgtgaagggcttctacccttccgatatcgccgtggaatgggagagcaatggccagcctgagaacaactacaagacaacccctcctgtgctggacagcgacggctcattcttcctgtacagcaagctgaccgtggacaagtccagatggcagcagggcaacgtgttcagctgtagcgtgctgcacgaagccctgcacagccactacacccagaaaagcctgtctctgagccccggcaaatgataa

SEQ ID NO: 688 - RNA, 1638 nt, synthetic construct
  source 1..1638: mol_type = other RNA
atggattggatctggcgcatcctgtttctcgtgggagctgccacaggcgcccactctcaagttcacctgacacagtctggccccgaagtgcggaagcctggcacaagcgtgaaggtgtcctgtaaagcccctggcaacaccctgaaaacctacgacctgcactgggtccgatctgtgcctggacaaggactgcagtggatgggctggattagccacgagggcgacaagaaagtgatcgtggaacggttcaaggccaaagtgaccatcgactgggacagaagcaccaacaccgcctacctgcagctgagcggactgacatctggcgataccgccgtgtactactgtgccaagggcagcaagcaccggctgagagattacgccctgtacgacgatgacggcgccctgaattgggccgtcgatgtggactacctgagcaacctggaattctggggccagggaacagccgtgacagtgtcttccggtggcggaggaagcggaggcggaggttcaggcggcggaggctctggcggtggtggatctgattttgtgctgacacagagccctcacagcctgagcgttacacctggcgagagcgccagcatcagctgcaagtctagccactctctgatccacggcgaccggaacaactacctggcttggtacgtgcagaagcccggcagatctcctcagctgctgatctacctggccagcagcagagctagcggcgtgccagatagattttctggcagcggcagcgacaaggatttcaccctgaagatctccagagtggaaaccgaggacgtgggcacctactactgtatgcagggcagagagagcccctggacatttggccagggcaccaaggtggacatcaaaggtggcggtggttctggcggaggcggaagtggcggcggtgggtccggaggtggtggatctgaacctaagagcagcgacaagacccacacctgtcctccatgtcctgctccagaactgctcggcggaccttccgtgttcctgtttcctccaaagcctaaggacaccctgatgatcagcagaacccctgaagtgacctgcgtggtggtggatgtgtctcacgaggaccccgaagtgaagttcaattggtacgtggacggcgtggaagtgcacaacgccaagaccaagcctagagaggaacagtacaacagcacctacagagtggtgtccgtgctgacagtgctgcaccaggattggctgaacggcaaagagtacaagtgcaaggtgtccaacaaggccctgcctgctcctatcgagaaaaccatcagcaaggccaagggccagcctcgcgaacctcaagtctgtacactgcctcctagccgcgacgaactgaccaagaaccaggtgtccctgagctgcgccgtgaagggcttttacccttccgatatcgccgtggaatgggagagcaatggccagcctgagaacaactacaagacaacccctcctgtgctggacagcgacggctcattcttcctggtgtccaagctgacagtggacaagagcagatggcagcagggcaacgtgttcagctgcagcgtgctgcatgaagccctgcacagccactacacccagaagtccctgtctctgagccccggcaagtgataa

SEQ ID NO: 689 - RNA, 1638 nt, synthetic construct
  source 1..1638: mol_type = other RNA
atggattggatctggcgcatcctgtttctcgtgggagctgccacaggcgcccactctcaagttcacctgacacagtctggccccgaagtgcggaagcctggcacaagcgtgaaggtgtcctgtaaagcccctggcaacaccctgaaaacctacgacctgcactgggtccgatctgtgcctggacaaggactgcagtggatgggctggattagccacgagggcgacaagaaagtgatcgtggaacggttcaaggccaaagtgaccatcgactgggacagaagcaccaacaccgcctacctgcagctgagcggactgacatctggcgataccgccgtgtactactgtgccaagggcagcaagcaccggctgagagattacgccctgtacgacgatgacggcgccctgaattgggccgtcgatgtggactacctgagcaacctggaattctggggccagggaacagccgtgacagtgtcttccggtggcggaggaagcggaggcggaggttcaggcggcggaggctctggcggtggtggatctgattttgtgctgacacagagccctcacagcctgagcgttacacctggcgagagcgccagcatcagctgcaagtctagccactctctgatccacggcgaccggaacaactacctggcttggtacgtgcagaagcccggcagatctcctcagctgctgatctacctggccagcagcagagctagcggcgtgccagatagattttctggcagcggcagcgacaaggatttcaccctgaagatctccagagtggaaaccgaggacgtgggcacctactactgtatgcagggcagagagagcccctggacatttggccagggcaccaaggtggacatcaaaggtggcggtggttctggcggaggcggaagtggcggcggtgggtccggaggtggtggatctgaacctaagagcagcgacaagacccacacctgtcctccatgtcctgctccagaactgctggccggaccttccgtgttcctgtttcctccaaagcctaaggacaccctgatgatcagcagaacccctgaagtgacctgcgtggtggtggatgtgtctcacgaggaccccgaagtgaagttcaattggtacgtggacggcgtggaagtgcacaatgccaagaccaagcctagagaggaacagtacaacagcacctacagagtggtgtccgtgctgaccgtgctgcaccaggattggctgaacggcaaagagtacaagtgcaaggtgtccaacaaggccctgcctctgcctgaggaaaagaccatcagcaaggccaagggccagcctcgcgaacctcaagtctgtacactgcctcctagccgcgacgaactgaccaagaaccaggtgtccctgagctgcgccgtgaagggcttttacccttccgatatcgccgtggaatgggagagcaatggccagcctgagaacaactacaagacaacccctcctgtgctggacagcgacggctcattcttcctggtgtccaagctgacagtggacaagagcagatggcagcagggcaacgtgttcagctgcagcgtgctgcatgaagccctgcacagccactacacccagaagtccctgtctctgagccccggcaagtgataa

SEQ ID NO: 690 - RNA, 1638 nt, synthetic construct
  source 1..1638: mol_type = other RNA
atggattggatctggcgcatcctgtttctcgtgggagctgccacaggcgcccactctcaagttcacctgacacagtctggccccgaagtgcggaagcctggcacaagcgtgaaggtgtcctgtaaagcccctggcaacaccctgaaaacctacgacctgcactgggtccgatctgtgcctggacaaggactgcagtggatgggctggattagccacgagggcgacaagaaagtgatcgtggaacggttcaaggccaaagtgaccatcgactgggacagaagcaccaacaccgcctacctgcagctgagcggactgacatctggcgataccgccgtgtactactgtgccaagggcagcaagcaccggctgagagattacgccctgtacgacgatgacggcgccctgaattgggccgtcgatgtggactacctgagcaacctggaattctggggccagggaacagccgtgacagtgtcttccggtggcggaggaagcggaggcggaggttcaggcggcggaggctctggcggtggtggatctgattttgtgctgacacagagccctcacagcctgagcgttacacctggcgagagcgccagcatcagctgcaagtctagccactctctgatccacggcgaccggaacaactacctggcttggtacgtgcagaagcccggcagatctcctcagctgctgatctacctggccagcagcagagctagcggcgtgccagatagattttctggcagcggcagcgacaaggatttcaccctgaagatctccagagtggaaaccgaggacgtgggcacctactactgtatgcagggcagagagagcccctggacatttggccagggcaccaaggtggacatcaaaggtggcggtggttctggcggaggcggaagtggcggcggtgggtccggaggtggtggatctgaacctaagagcagcgacaagacccacacctgtcctccatgtcctgctccagaactgctggccggaccttccgtgttcctgtttcctccaaagcctaaggacaccctgatgatcagcagaacccctgaagtgacctgcgtggtggtggatgtgtctcacgaggaccctgaagtgaagttcaattggtacgtggacggcgtggaagtgcacaacgccaagaccaagcctagagaggaacagtacaacagcacctacagagtggtgtccgtgctgaccgtgctgcaccaggattggctgaacggcaaagagtacaagtgcaaggtgtccaacaaggccctgcctgcccctgaggaaaagaccatcagcaaggccaagggccagcctcgcgaacctcaagtctgtacactgcctcctagccgcgacgaactgaccaagaaccaggtgtccctgagctgcgccgtgaagggcttttacccttccgatatcgccgtggaatgggagagcaatggccagcctgagaacaactacaagacaacccctcctgtgctggacagcgacggctcattcttcctggtgtccaagctgacagtggacaagagcagatggcagcagggcaacgtgttcagctgcagcgtgctgcatgaagccctgcacagccactacacccagaagtccctgtctctgagccccggcaagtgataa

SEQ ID NO: 691 - RNA, 1638 nt, synthetic construct
  source 1..1638: mol_type = other RNA
atggattggatctggcgcatcctgtttctcgtgggagctgccacaggcgcccactctcaagttcacctgacacagtctggccccgaagtgcggaagcctggcacaagcgtgaaggtgtcctgtaaagcccctggcaacaccctgaaaacctacgacctgcactgggtccgatctgtgcctggacaaggactgcagtggatgggctggattagccacgagggcgacaagaaagtgatcgtggaacggttcaaggccaaagtgaccatcgactgggacagaagcaccaacaccgcctacctgcagctgagcggactgacatctggcgataccgccgtgtactactgtgccaagggcagcaagcaccggctgagagattacgccctgtacgacgatgacggcgccctgaattgggccgtcgatgtggactacctgagcaacctggaattctggggccagggaacagccgtgacagtgtcttccggtggcggaggaagcggaggcggaggttcaggcggcggaggctctggcggtggtggatctgattttgtgctgacacagagccctcacagcctgagcgttacacctggcgagagcgccagcatcagctgcaagtctagccactctctgatccacggcgaccggaacaactacctggcttggtacgtgcagaagcccggcagatctcctcagctgctgatctacctggccagcagcagagctagcggcgtgccagatagattttctggcagcggcagcgacaaggatttcaccctgaagatctccagagtggaaaccgaggacgtgggcacctactactgtatgcagggcagagagagcccctggacatttggccagggcaccaaggtggacatcaaaggtggcggtggttctggcggaggcggaagtggcggcggtgggtccggaggtggtggatctgaacctaagagcagcgacaagacccacacctgtcctccatgtcctgctccagaactgctggccggaccttccgtgttcctgtttcctccaaagcctaaggacaccctgatgatcagcagaacccctgaagtgacctgcgtggtggtggatgtgtctcacgaggaccctgaagtgaagttcaattggtacgtggacggcgtggaagtgcacaacgccaagaccaagcctagagaggaacagtacaacagcacctacagagtggtgtccgtgctgaccgtgctgcaccaggattggctgaacggcaaagagtacaagtgcaaggtgtccaacaaggccctgcctgcccctatcgaaaagaccatcagcaaggccaagggccagcctcgcgaacctcaagtctgtacactgcctcctagccgcgacgaactgaccaagaaccaggtgtccctgagctgcgccgtgaagggcttttacccttccgatatcgccgtggaatgggagagcaatggccagcctgagaacaactacaagacaacccctcctgtgctggacagcgacggctcattcttcctggtgtccaagctgacagtggacaagagcagatggcagcagggcaacgtgttcagctgcagcgtgctgcatgaagccctgcacagccactacacccagaagtccctgtctctgagccccggcaagtgataa

SEQ ID NO: 692 - RNA, 1638 nt, synthetic construct
  source 1..1638: mol_type = other RNA
atggattggatctggcgcatcctgtttctcgtgggagctgccacaggcgcccactctcaagttcacctgacacagtctggccccgaagtgcggaagcctggcacaagcgtgaaggtgtcctgtaaagcccctggcaacaccctgaaaacctacgacctgcactgggtccgatctgtgcctggacaaggactgcagtggatgggctggattagccacgagggcgacaagaaagtgatcgtggaacggttcaaggccaaagtgaccatcgactgggacagaagcaccaacaccgcctacctgcagctgagcggactgacatctggcgataccgccgtgtactactgtgccaagggcagcaagcaccggctgagagattacgccctgtacgacgatgacggcgccctgaattgggccgtcgatgtggactacctgagcaacctggaattctggggccagggaacagccgtgacagtgtcttccggtggcggaggaagcggaggcggaggttcaggcggcggaggctctggcggtggtggatctgattttgtgctgacacagagccctcacagcctgagcgttacacctggcgagagcgccagcatcagctgcaagtctagccactctctgatccacggcgaccggaacaactacctggcttggtacgtgcagaagcccggcagatctcctcagctgctgatctacctggccagcagcagagctagcggcgtgccagatagattttctggcagcggcagcgacaaggatttcaccctgaagatctccagagtggaaaccgaggacgtgggcacctactactgtatgcagggcagagagagcccctggacatttggccagggcaccaaggtggacatcaaaggtggcggtggttctggcggaggcggaagtggcggcggtgggtccggaggtggtggatctgaacctaagagcagcgacaagacccacacctgtcctccatgtcctgctccagaactgctgggcggaccttccgtgttcctgtttcctccaaagcctaaggacaccctgatgatcagcagaacccctgaagtgacctgcgtggtggtggatgtgtctcacgaggaccctgaagtgaagttcaattggtacgtggacggcgtggaagtgcacaacgccaagaccaagcctagagaggaacagtacaacagcacctacagagtggtgtccgtgctgaccgtgctgcaccaggattggctgaacggcaaagagtacaagtgcaaggtgtccaacaaggccctgcctgcccctgaggaaaagaccatcagcaaggccaagggccagcctcgcgaacctcaagtctgtacactgcctcctagccgcgacgaactgaccaagaaccaggtgtccctgagctgcgccgtgaagggcttttacccttccgatatcgccgtggaatgggagagcaatggccagcctgagaacaactacaagacaacccctcctgtgctggacagcgacggctcattcttcctggtgtccaagctgacagtggacaagagcagatggcagcagggcaacgtgttcagctgcagcgtgctgcatgaagccctgcacagccactacacccagaagtccctgtctctgagccccggcaagtgataa

SEQ ID NO: 693 - RNA, 1638 nt, synthetic construct
  source 1..1638: mol_type = other RNA
atggattggatctggcgcatcctgtttctcgtgggagctgccacaggcgcccactctcaagttcacctgacacagtctggccccgaagtgcggaagcctggcacaagcgtgaaggtgtcctgtaaagcccctggcaacaccctgaaaacctacgacctgcactgggtccgatctgtgcctggacaaggactgcagtggatgggctggattagccacgagggcgacaagaaagtgatcgtggaacggttcaaggccaaagtgaccatcgactgggacagaagcaccaacaccgcctacctgcagctgagcggactgacatctggcgataccgccgtgtactactgtgccaagggcagcaagcaccggctgagagattacgccctgtacgacgatgacggcgccctgaattgggccgtcgatgtggactacctgagcaacctggaattctggggccagggaacagccgtgacagtgtcttccggtggcggaggaagcggaggcggaggttcaggcggcggaggctctggcggtggtggatctgattttgtgctgacacagagccctcacagcctgagcgttacacctggcgagagcgccagcatcagctgcaagtctagccactctctgatccacggcgaccggaacaactacctggcttggtacgtgcagaagcccggcagatctcctcagctgctgatctacctggccagcagcagagctagcggcgtgccagatagattttctggcagcggcagcgacaaggatttcaccctgaagatctccagagtggaaaccgaggacgtgggcacctactactgtatgcagggcagagagagcccctggacatttggccagggcaccaaggtggacatcaaaggtggcggtggttctggcggaggcggaagtggcggcggtgggtccggaggtggtggatctgaacctaagagcagcgacaagacccacacctgtcctccatgtcctgctccagaactgctcggcggaccttccgtgttcctgtttcctccaaagcctaaggacaccctgatgatcagcagaacccctgaagtgacctgcgtggtggtggatgtgtctcacgaggaccccgaagtgaagttcaattggtacgtggacggcgtggaagtgcacaacgccaagaccaagcctagagaggaacagtacaacagcacctacagagtggtgtccgtgctgacagtgctgcaccaggattggctgaacggcaaagagtacaagtgcaaggtgtccaacaaggccctgcctgctcctatcgagaaaaccatcagcaaggccaagggccagcctagggaaccccaggtttacaccctgcctccatgccgcgacgaactgaccaagaaccaggtgtccctgtggtgcctggtcaagggcttctacccttccgatatcgccgtggaatgggagagcaatggccagcctgagaacaactacaagacaacccctcctgtgctggacagcgacggctcattcttcctgtacagcaagctgacagtggacaagagcagatggcagcagggcaacgtgttcagctgcagcgtgctgcatgaagccctgcacagccactacacccagaagtccctgtctctgagccccggcaagtgataa

SEQ ID NO: 694 - RNA, 1638 nt, synthetic construct
  source 1..1638: mol_type = other RNA
atggattggatctggcgcatcctgtttctcgtgggagctgccacaggcgcccactctcaagttcacctgacacagtctggccccgaagtgcggaagcctggcacaagcgtgaaggtgtcctgtaaagcccctggcaacaccctgaaaacctacgacctgcactgggtccgatctgtgcctggacaaggactgcagtggatgggctggattagccacgagggcgacaagaaagtgatcgtggaacggttcaaggccaaagtgaccatcgactgggacagaagcaccaacaccgcctacctgcagctgagcggactgacatctggcgataccgccgtgtactactgtgccaagggcagcaagcaccggctgagagattacgccctgtacgacgatgacggcgccctgaattgggccgtcgatgtggactacctgagcaacctggaattctggggccagggaacagccgtgacagtgtcttccggtggcggaggaagcggaggcggaggttcaggcggcggaggctctggcggtggtggatctgattttgtgctgacacagagccctcacagcctgagcgttacacctggcgagagcgccagcatcagctgcaagtctagccactctctgatccacggcgaccggaacaactacctggcttggtacgtgcagaagcccggcagatctcctcagctgctgatctacctggccagcagcagagctagcggcgtgccagatagattttctggcagcggcagcgacaaggatttcaccctgaagatctccagagtggaaaccgaggacgtgggcacctactactgtatgcagggcagagagagcccctggacatttggccagggcaccaaggtggacatcaaaggtggcggtggttctggcggaggcggaagtggcggcggtgggtccggaggtggtggatctgaacctaagagcagcgacaagacccacacctgtcctccatgtcctgctccagaactgctggccggaccttccgtgttcctgtttcctccaaagcctaaggacaccctgatgatcagcagaacccctgaagtgacctgcgtggtggtggatgtgtctcacgaggaccccgaagtgaagttcaattggtacgtggacggcgtggaagtgcacaatgccaagaccaagcctagagaggaacagtacaacagcacctacagagtggtgtccgtgctgaccgtgctgcaccaggattggctgaacggcaaagagtacaagtgcaaggtgtccaacaaggccctgcctctgcctgaggaaaagaccatcagcaaggccaagggccagcctagggaaccccaggtttacaccctgcctccatgccgcgacgaactgaccaagaaccaggtgtccctgtggtgcctggtcaagggcttctacccttccgatatcgccgtggaatgggagagcaatggccagcctgagaacaactacaagacaacccctcctgtgctggacagcgacggctcattcttcctgtacagcaagctgacagtggacaagagcagatggcagcagggcaacgtgttcagctgcagcgtgctgcatgaagccctgcacagccactacacccagaagtccctgtctctgagccccggcaagtgataa

SEQ ID NO: 695 - RNA, 1638 nt, synthetic construct
  source 1..1638: mol_type = other RNA
atggattggatctggcgcatcctgtttctcgtgggagctgccacaggcgcccactctcaagttcacctgacacagtctggccccgaagtgcggaagcctggcacaagcgtgaaggtgtcctgtaaagcccctggcaacaccctgaaaacctacgacctgcactgggtccgatctgtgcctggacaaggactgcagtggatgggctggattagccacgagggcgacaagaaagtgatcgtggaacggttcaaggccaaagtgaccatcgactgggacagaagcaccaacaccgcctacctgcagctgagcggactgacatctggcgataccgccgtgtactactgtgccaagggcagcaagcaccggctgagagattacgccctgtacgacgatgacggcgccctgaattgggccgtcgatgtggactacctgagcaacctggaattctggggccagggaacagccgtgacagtgtcttccggtggcggaggaagcggaggcggaggttcaggcggcggaggctctggcggtggtggatctgattttgtgctgacacagagccctcacagcctgagcgttacacctggcgagagcgccagcatcagctgcaagtctagccactctctgatccacggcgaccggaacaactacctggcttggtacgtgcagaagcccggcagatctcctcagctgctgatctacctggccagcagcagagctagcggcgtgccagatagattttctggcagcggcagcgacaaggatttcaccctgaagatctccagagtggaaaccgaggacgtgggcacctactactgtatgcagggcagagagagcccctggacatttggccagggcaccaaggtggacatcaaaggtggcggtggttctggcggaggcggaagtggcggcggtgggtccggaggtggtggatctgaacctaagagcagcgacaagacccacacctgtcctccatgtcctgctccagaactgctggccggaccttccgtgttcctgtttcctccaaagcctaaggacaccctgatgatcagcagaacccctgaagtgacctgcgtggtggtggatgtgtctcacgaggaccctgaagtgaagttcaattggtacgtggacggcgtggaagtgcacaacgccaagaccaagcctagagaggaacagtacaacagcacctacagagtggtgtccgtgctgaccgtgctgcaccaggattggctgaacggcaaagagtacaagtgcaaggtgtccaacaaggccctgcctgcccctgaggaaaagaccatcagcaaggccaagggccagcctagggaaccccaggtttacaccctgcctccatgccgcgacgaactgaccaagaaccaggtgtccctgtggtgcctggtcaagggcttctacccttccgatatcgccgtggaatgggagagcaatggccagcctgagaacaactacaagacaacccctcctgtgctggacagcgacggctcattcttcctgtacagcaagctgacagtggacaagagcagatggcagcagggcaacgtgttcagctgcagcgtgctgcatgaagccctgcacagccactacacccagaagtccctgtctctgagccccggcaagtgataa

SEQ ID NO: 696 - RNA, 1638 nt, synthetic construct
  source 1..1638: mol_type = other RNA
atggattggatctggcgcatcctgtttctcgtgggagctgccacaggcgcccactctcaagttcacctgacacagtctggccccgaagtgcggaagcctggcacaagcgtgaaggtgtcctgtaaagcccctggcaacaccctgaaaacctacgacctgcactgggtccgatctgtgcctggacaaggactgcagtggatgggctggattagccacgagggcgacaagaaagtgatcgtggaacggttcaaggccaaagtgaccatcgactgggacagaagcaccaacaccgcctacctgcagctgagcggactgacatctggcgataccgccgtgtactactgtgccaagggcagcaagcaccggctgagagattacgccctgtacgacgatgacggcgccctgaattgggccgtcgatgtggactacctgagcaacctggaattctggggccagggaacagccgtgacagtgtcttccggtggcggaggaagcggaggcggaggttcaggcggcggaggctctggcggtggtggatctgattttgtgctgacacagagccctcacagcctgagcgttacacctggcgagagcgccagcatcagctgcaagtctagccactctctgatccacggcgaccggaacaactacctggcttggtacgtgcagaagcccggcagatctcctcagctgctgatctacctggccagcagcagagctagcggcgtgccagatagattttctggcagcggcagcgacaaggatttcaccctgaagatctccagagtggaaaccgaggacgtgggcacctactactgtatgcagggcagagagagcccctggacatttggccagggcaccaaggtggacatcaaaggtggcggtggttctggcggaggcggaagtggcggcggtgggtccggaggtggtggatctgaacctaagagcagcgacaagacccacacctgtcctccatgtcctgctccagaactgctggccggaccttccgtgttcctgtttcctccaaagcctaaggacaccctgatgatcagcagaacccctgaagtgacctgcgtggtggtggatgtgtctcacgaggaccctgaagtgaagttcaattggtacgtggacggcgtggaagtgcacaacgccaagaccaagcctagagaggaacagtacaacagcacctacagagtggtgtccgtgctgaccgtgctgcaccaggattggctgaacggcaaagagtacaagtgcaaggtgtccaacaaggccctgcctgcccctatcgaaaagaccatcagcaaggccaagggccagcctagggaaccccaggtttacaccctgcctccatgccgcgacgaactgaccaagaaccaggtgtccctgtggtgcctggtcaagggcttctacccttccgatatcgccgtggaatgggagagcaatggccagcctgagaacaactacaagacaacccctcctgtgctggacagcgacggctcattcttcctgtacagcaagctgacagtggacaagagcagatggcagcagggcaacgtgttcagctgcagcgtgctgcatgaagccctgcacagccactacacccagaagtccctgtctctgagccccggcaagtgataa

SEQ ID NO: 697 - RNA, 1638 nt, synthetic construct
  source 1..1638: mol_type = other RNA
atggattggatctggcgcatcctgtttctcgtgggagctgccacaggcgcccactctcaagttcacctgacacagtctggccccgaagtgcggaagcctggcacaagcgtgaaggtgtcctgtaaagcccctggcaacaccctgaaaacctacgacctgcactgggtccgatctgtgcctggacaaggactgcagtggatgggctggattagccacgagggcgacaagaaagtgatcgtggaacggttcaaggccaaagtgaccatcgactgggacagaagcaccaacaccgcctacctgcagctgagcggactgacatctggcgataccgccgtgtactactgtgccaagggcagcaagcaccggctgagagattacgccctgtacgacgatgacggcgccctgaattgggccgtcgatgtggactacctgagcaacctggaattctggggccagggaacagccgtgacagtgtcttccggtggcggaggaagcggaggcggaggttcaggcggcggaggctctggcggtggtggatctgattttgtgctgacacagagccctcacagcctgagcgttacacctggcgagagcgccagcatcagctgcaagtctagccactctctgatccacggcgaccggaacaactacctggcttggtacgtgcagaagcccggcagatctcctcagctgctgatctacctggccagcagcagagctagcggcgtgccagatagattttctggcagcggcagcgacaaggatttcaccctgaagatctccagagtggaaaccgaggacgtgggcacctactactgtatgcagggcagagagagcccctggacatttggccagggcaccaaggtggacatcaaaggtggcggtggttctggcggaggcggaagtggcggcggtgggtccggaggtggtggatctgaacctaagagcagcgacaagacccacacctgtcctccatgtcctgctccagaactgctgggcggaccttccgtgttcctgtttcctccaaagcctaaggacaccctgatgatcagcagaacccctgaagtgacctgcgtggtggtggatgtgtctcacgaggaccctgaagtgaagttcaattggtacgtggacggcgtggaagtgcacaacgccaagaccaagcctagagaggaacagtacaacagcacctacagagtggtgtccgtgctgaccgtgctgcaccaggattggctgaacggcaaagagtacaagtgcaaggtgtccaacaaggccctgcctgcccctgaggaaaagaccatcagcaaggccaagggccagcctagggaaccccaggtttacaccctgcctccatgccgcgacgaactgaccaagaaccaggtgtccctgtggtgcctggtcaagggcttctacccttccgatatcgccgtggaatgggagagcaatggccagcctgagaacaactacaagacaacccctcctgtgctggacagcgacggctcattcttcctgtacagcaagctgacagtggacaagagcagatggcagcagggcaacgtgttcagctgcagcgtgctgcatgaagccctgcacagccactacacccagaagtccctgtctctgagccccggcaagtgataa

SEQ ID NO: 698 - RNA, 1638 nt, synthetic construct
  source 1..1638: mol_type = other RNA
atggattggatctggcgcatcctgtttctcgtgggagctgccacaggcgcccactctgattttgtgctgacacagtctccccacagcctgagcgttacacctggcgagtctgccagcatcagctgcaagtctagccactctctgatccacggcgaccggaacaactacctggcttggtacgtgcagaagcccggcagatctcctcagctgctgatctacctggccagcagcagagcttctggcgtgcccgatagattttctggcagcggcagcgacaaggacttcaccctgaagatctccagagtggaaaccgaggacgtgggcacctactactgtatgcagggcagagagagcccctggacatttggccagggcaccaaggtggacatcaaaggcggcggaggaagcggaggcggaggttctggtggcggaggctcaggcggtggcggatctcaagttcatctgacacagagcggccctgaagtgcggaagcctggcacaagcgtgaaggtgtcctgtaaagcccctggcaacaccctgaaaacctacgacctgcactgggtccgatctgtgcctggacagggactgcaatggatgggctggattagccacgagggcgacaagaaagtgatcgtggaacggttcaaggccaaagtgaccatcgactgggacagaagcaccaacaccgcctacctgcagctgagcggactgacatctggcgataccgccgtgtactactgtgccaagggcagcaagcaccggctgagagattacgccctgtacgacgatgacggcgccctgaattgggccgtcgatgtggactacctgagcaacctggaattctggggccagggaacagccgtgacagtgtcttccggcggaggtggaagtggtggtggcggtagcggaggcggtgggtccggaggtggtggatctgaacctaagagcagcgacaagacccacacctgtcctccatgtcctgctccagaactgctcggcggaccttccgtgttcctgtttcctccaaagcctaaggacaccctgatgatcagcagaacccctgaagtgacctgcgtggtggtggatgtgtctcacgaggaccccgaagtgaagttcaattggtacgtggacggcgtggaagtgcacaacgccaagaccaagcctagagaggaacagtacaacagcacctacagagtggtgtccgtgctgacagtgctgcaccaggattggctgaacggcaaagagtacaagtgcaaggtgtccaacaaggccctgcctgctcctatcgagaaaaccatcagcaaggccaagggccagcctagggaaccccaggtttacacactgcctccaagccgcgaggaaatgaccaagaaccaggtgtccctgacctgcctcgtgaagggcttctacccttccgatatcgccgtggaatgggagagcaatggccagcctgagaacaactacaagacaacccctcctgtgctggacagcgacggctcattcttcctgtacagcaagctgactgtggataagtcccggtggcagcagggcaacgtgttcagctgttctgtgatgcacgaagccctgcacaaccactacacccagaaaagcctgtctctgagccccggcaagtgataa

SEQ ID NO: 699 - RNA, 1638 nt, synthetic construct
  source 1..1638: mol_type = other RNA
atggattggatctggcgcatcctgtttctcgtgggagctgccacaggcgcccactctgattttgtgctgacacagtctccccacagcctgagcgttacacctggcgagtctgccagcatcagctgcaagtctagccactctctgatccacggcgaccggaacaactacctggcttggtacgtgcagaagcccggcagatctcctcagctgctgatctacctggccagcagcagagcttctggcgtgcccgatagattttctggcagcggcagcgacaaggacttcaccctgaagatctccagagtggaaaccgaggacgtgggcacctactactgtatgcagggcagagagagcccctggacatttggccagggcaccaaggtggacatcaaaggcggcggaggaagcggaggcggaggttctggtggcggaggctcaggcggtggcggatctcaagttcatctgacacagagcggccctgaagtgcggaagcctggcacaagcgtgaaggtgtcctgtaaagcccctggcaacaccctgaaaacctacgacctgcactgggtccgatctgtgcctggacagggactgcaatggatgggctggattagccacgagggcgacaagaaagtgatcgtggaacggttcaaggccaaagtgaccatcgactgggacagaagcaccaacaccgcctacctgcagctgagcggactgacatctggcgataccgccgtgtactactgtgccaagggcagcaagcaccggctgagagattacgccctgtacgacgatgacggcgccctgaattgggccgtcgatgtggactacctgagcaacctggaattctggggccagggaacagccgtgacagtgtcttccggcggaggtggaagtggtggtggcggtagcggaggcggtgggtccggaggtggtggatctgaacctaagagcagcgacaagacccacacctgtcctccatgtcctgctccagaactgctcggcggaccttccgtgttcctgtttcctccaaagcctaaggacaccctgatgatcagcagaacccctgaagtgacctgcgtggtggtggatgtgtctcacgaggaccccgaagtgaagttcaattggtacgtggacggcgtggaagtgcacaacgccaagaccaagcctagagaggaacagtacaacagcacctacagagtggtgtccgtgctgacagtgctgcaccaggattggctgaacggcaaagagtacaagtgcaaggtgtccaacaaggccctgcctgctcctatcgagaaaaccatcagcaaggccaagggccagcctagggaaccccaggtttacacactgcctccaagccgcgaggaaatgaccaagaaccaggtgtccctgacctgcctcgtgaagggcttctacccttccgatatcgccgtggaatgggagagcaatggccagcctgagaacaactacaagacaacccctcctgtgctggacagcgacggctcattcttcctgtacagcaagctgaccgtggacaagtccagatggcagcagggcaacgtgttcagctgtagcgtgctgcacgaagccctgcacagccactacacccagaaaagcctgtctctgagccccggcaaatgataa

SEQ ID NO: 700 - RNA, 1638 nt, synthetic construct
  source 1..1638: mol_type = other RNA
atggattggatctggcgcatcctgtttctcgtgggagctgccacaggcgcccactctgattttgtgctgacacagtctccccacagcctgagcgttacacctggcgagtctgccagcatcagctgcaagtctagccactctctgatccacggcgaccggaacaactacctggcttggtacgtgcagaagcccggcagatctcctcagctgctgatctacctggccagcagcagagcttctggcgtgcccgatagattttctggcagcggcagcgacaaggacttcaccctgaagatctccagagtggaaaccgaggacgtgggcacctactactgtatgcagggcagagagagcccctggacatttggccagggcaccaaggtggacatcaaaggcggcggaggaagcggaggcggaggttctggtggcggaggctcaggcggtggcggatctcaagttcatctgacacagagcggccctgaagtgcggaagcctggcacaagcgtgaaggtgtcctgtaaagcccctggcaacaccctgaaaacctacgacctgcactgggtccgatctgtgcctggacagggactgcaatggatgggctggattagccacgagggcgacaagaaagtgatcgtggaacggttcaaggccaaagtgaccatcgactgggacagaagcaccaacaccgcctacctgcagctgagcggactgacatctggcgataccgccgtgtactactgtgccaagggcagcaagcaccggctgagagattacgccctgtacgacgatgacggcgccctgaattgggccgtcgatgtggactacctgagcaacctggaattctggggccagggaacagccgtgacagtgtcttccggcggaggtggaagtggtggtggcggtagcggaggcggtgggtccggaggtggtggatctgaacctaagagcagcgacaagacccacacctgtcctccatgtcctgctccagaactgctggccggaccttccgtgttcctgtttcctccaaagcctaaggacaccctgatgatcagcagaacccctgaagtgacctgcgtggtggtggatgtgtctcacgaggaccccgaagtgaagttcaattggtacgtggacggcgtggaagtgcacaatgccaagaccaagcctagagaggaacagtacaacagcacctacagagtggtgtccgtgctgaccgtgctgcaccaggattggctgaacggcaaagagtacaagtgcaaggtgtccaacaaggccctgcctctgcctgaggaaaagaccatcagcaaggccaagggccagcctagggaaccccaggtttacacactgcctccaagccgcgaggaaatgaccaagaaccaggtgtccctgacctgcctcgtgaagggcttctacccttccgatatcgccgtggaatgggagagcaatggccagcctgagaacaactacaagacaacccctcctgtgctggacagcgacggctcattcttcctgtacagcaagctgaccgtggacaagtccagatggcagcagggcaacgtgttcagctgtagcgtgctgcacgaagccctgcacagccactacacccagaaaagcctgtctctgagccccggcaaatgataa

SEQ ID NO: 701 - RNA, 1638 nt, synthetic construct
  source 1..1638: mol_type = other RNA
atggattggatctggcgcatcctgtttctcgtgggagctgccacaggcgcccactctgattttgtgctgacacagtctccccacagcctgagcgttacacctggcgagtctgccagcatcagctgcaagtctagccactctctgatccacggcgaccggaacaactacctggcttggtacgtgcagaagcccggcagatctcctcagctgctgatctacctggccagcagcagagcttctggcgtgcccgatagattttctggcagcggcagcgacaaggacttcaccctgaagatctccagagtggaaaccgaggacgtgggcacctactactgtatgcagggcagagagagcccctggacatttggccagggcaccaaggtggacatcaaaggcggcggaggaagcggaggcggaggttctggtggcggaggctcaggcggtggcggatctcaagttcatctgacacagagcggccctgaagtgcggaagcctggcacaagcgtgaaggtgtcctgtaaagcccctggcaacaccctgaaaacctacgacctgcactgggtccgatctgtgcctggacagggactgcaatggatgggctggattagccacgagggcgacaagaaagtgatcgtggaacggttcaaggccaaagtgaccatcgactgggacagaagcaccaacaccgcctacctgcagctgagcggactgacatctggcgataccgccgtgtactactgtgccaagggcagcaagcaccggctgagagattacgccctgtacgacgatgacggcgccctgaattgggccgtcgatgtggactacctgagcaacctggaattctggggccagggaacagccgtgacagtgtcttccggcggaggtggaagtggtggtggcggtagcggaggcggtgggtccggaggtggtggatctgaacctaagagcagcgacaagacccacacctgtcctccatgtcctgctccagaactgctggccggaccttccgtgttcctgtttcctccaaagcctaaggacaccctgatgatcagcagaacccctgaagtgacctgcgtggtggtggatgtgtctcacgaggaccctgaagtgaagttcaattggtacgtggacggcgtggaagtgcacaacgccaagaccaagcctagagaggaacagtacaacagcacctacagagtggtgtccgtgctgaccgtgctgcaccaggattggctgaacggcaaagagtacaagtgcaaggtgtccaacaaggccctgcctgcccctgaggaaaagaccatcagcaaggccaagggccagcctagggaaccccaggtttacacactgcctccaagccgcgaggaaatgaccaagaaccaggtgtccctgacctgcctcgtgaagggcttctacccttccgatatcgccgtggaatgggagagcaatggccagcctgagaacaactacaagacaacccctcctgtgctggacagcgacggctcattcttcctgtacagcaagctgaccgtggacaagtccagatggcagcagggcaacgtgttcagctgtagcgtgctgcacgaagccctgcacagccactacacccagaaaagcctgtctctgagccccggcaaatgataa

SEQ ID NO: 702 - RNA, 1638 nt, synthetic construct
  source 1..1638: mol_type = other RNA
atggattggatctggcgcatcctgtttctcgtgggagctgccacaggcgcccactctgattttgtgctgacacagtctccccacagcctgagcgttacacctggcgagtctgccagcatcagctgcaagtctagccactctctgatccacggcgaccggaacaactacctggcttggtacgtgcagaagcccggcagatctcctcagctgctgatctacctggccagcagcagagcttctggcgtgcccgatagattttctggcagcggcagcgacaaggacttcaccctgaagatctccagagtggaaaccgaggacgtgggcacctactactgtatgcagggcagagagagcccctggacatttggccagggcaccaaggtggacatcaaaggcggcggaggaagcggaggcggaggttctggtggcggaggctcaggcggtggcggatctcaagttcatctgacacagagcggccctgaagtgcggaagcctggcacaagcgtgaaggtgtcctgtaaagcccctggcaacaccctgaaaacctacgacctgcactgggtccgatctgtgcctggacagggactgcaatggatgggctggattagccacgagggcgacaagaaagtgatcgtggaacggttcaaggccaaagtgaccatcgactgggacagaagcaccaacaccgcctacctgcagctgagcggactgacatctggcgataccgccgtgtactactgtgccaagggcagcaagcaccggctgagagattacgccctgtacgacgatgacggcgccctgaattgggccgtcgatgtggactacctgagcaacctggaattctggggccagggaacagccgtgacagtgtcttccggcggaggtggaagtggtggtggcggtagcggaggcggtgggtccggaggtggtggatctgaacctaagagcagcgacaagacccacacctgtcctccatgtcctgctccagaactgctggccggaccttccgtgttcctgtttcctccaaagcctaaggacaccctgatgatcagcagaacccctgaagtgacctgcgtggtggtggatgtgtctcacgaggaccctgaagtgaagttcaattggtacgtggacggcgtggaagtgcacaacgccaagaccaagcctagagaggaacagtacaacagcacctacagagtggtgtccgtgctgaccgtgctgcaccaggattggctgaacggcaaagagtacaagtgcaaggtgtccaacaaggccctgcctgcccctatcgaaaagaccatcagcaaggccaagggccagcctagggaaccccaggtttacacactgcctccaagccgcgaggaaatgaccaagaaccaggtgtccctgacctgcctcgtgaagggcttctacccttccgatatcgccgtggaatgggagagcaatggccagcctgagaacaactacaagacaacccctcctgtgctggacagcgacggctcattcttcctgtacagcaagctgaccgtggacaagtccagatggcagcagggcaacgtgttcagctgtagcgtgctgcacgaagccctgcacagccactacacccagaaaagcctgtctctgagccccggcaaatgataa

SEQ ID NO: 703 - RNA, 1638 nt, synthetic construct
  source 1..1638: mol_type = other RNA
atggattggatctggcgcatcctgtttctcgtgggagctgccacaggcgcccactctgattttgtgctgacacagtctccccacagcctgagcgttacacctggcgagtctgccagcatcagctgcaagtctagccactctctgatccacggcgaccggaacaactacctggcttggtacgtgcagaagcccggcagatctcctcagctgctgatctacctggccagcagcagagcttctggcgtgcccgatagattttctggcagcggcagcgacaaggacttcaccctgaagatctccagagtggaaaccgaggacgtgggcacctactactgtatgcagggcagagagagcccctggacatttggccagggcaccaaggtggacatcaaaggcggcggaggaagcggaggcggaggttctggtggcggaggctcaggcggtggcggatctcaagttcatctgacacagagcggccctgaagtgcggaagcctggcacaagcgtgaaggtgtcctgtaaagcccctggcaacaccctgaaaacctacgacctgcactgggtccgatctgtgcctggacagggactgcaatggatgggctggattagccacgagggcgacaagaaagtgatcgtggaacggttcaaggccaaagtgaccatcgactgggacagaagcaccaacaccgcctacctgcagctgagcggactgacatctggcgataccgccgtgtactactgtgccaagggcagcaagcaccggctgagagattacgccctgtacgacgatgacggcgccctgaattgggccgtcgatgtggactacctgagcaacctggaattctggggccagggaacagccgtgacagtgtcttccggcggaggtggaagtggtggtggcggtagcggaggcggtgggtccggaggtggtggatctgaacctaagagcagcgacaagacccacacctgtcctccatgtcctgctccagaactgctgggcggaccttccgtgttcctgtttcctccaaagcctaaggacaccctgatgatcagcagaacccctgaagtgacctgcgtggtggtggatgtgtctcacgaggaccctgaagtgaagttcaattggtacgtggacggcgtggaagtgcacaacgccaagaccaagcctagagaggaacagtacaacagcacctacagagtggtgtccgtgctgaccgtgctgcaccaggattggctgaacggcaaagagtacaagtgcaaggtgtccaacaaggccctgcctgcccctgaggaaaagaccatcagcaaggccaagggccagcctagggaaccccaggtttacacactgcctccaagccgcgaggaaatgaccaagaaccaggtgtccctgacctgcctcgtgaagggcttctacccttccgatatcgccgtggaatgggagagcaatggccagcctgagaacaactacaagacaacccctcctgtgctggacagcgacggctcattcttcctgtacagcaagctgaccgtggacaagtccagatggcagcagggcaacgtgttcagctgtagcgtgctgcacgaagccctgcacagccactacacccagaaaagcctgtctctgagccccggcaaatgataa

SEQ ID NO: 704 - RNA, 1638 nt, synthetic construct
  source 1..1638: mol_type = other RNA
atggattggatctggcgcatcctgtttctcgtgggagctgccacaggcgcccactctgattttgtgctgacacagtctccccacagcctgagcgttacacctggcgagtctgccagcatcagctgcaagtctagccactctctgatccacggcgaccggaacaactacctggcttggtacgtgcagaagcccggcagatctcctcagctgctgatctacctggccagcagcagagcttctggcgtgcccgatagattttctggcagcggcagcgacaaggacttcaccctgaagatctccagagtggaaaccgaggacgtgggcacctactactgtatgcagggcagagagagcccctggacatttggccagggcaccaaggtggacatcaaaggcggcggaggaagcggaggcggaggttctggtggcggaggctcaggcggtggcggatctcaagttcatctgacacagagcggccctgaagtgcggaagcctggcacaagcgtgaaggtgtcctgtaaagcccctggcaacaccctgaaaacctacgacctgcactgggtccgatctgtgcctggacagggactgcaatggatgggctggattagccacgagggcgacaagaaagtgatcgtggaacggttcaaggccaaagtgaccatcgactgggacagaagcaccaacaccgcctacctgcagctgagcggactgacatctggcgataccgccgtgtactactgtgccaagggcagcaagcaccggctgagagattacgccctgtacgacgatgacggcgccctgaattgggccgtcgatgtggactacctgagcaacctggaattctggggccagggaacagccgtgacagtgtcttccggcggaggtggaagtggtggtggcggtagcggaggcggtgggtccggaggtggtggatctgaacctaagagcagcgacaagacccacacctgtcctccatgtcctgctccagaactgctcggcggaccttccgtgttcctgtttcctccaaagcctaaggacaccctgatgatcagcagaacccctgaagtgacctgcgtggtggtggatgtgtctcacgaggaccccgaagtgaagttcaattggtacgtggacggcgtggaagtgcacaacgccaagaccaagcctagagaggaacagtacaacagcacctacagagtggtgtccgtgctgacagtgctgcaccaggattggctgaacggcaaagagtacaagtgcaaggtgtccaacaaggccctgcctgctcctatcgagaaaaccatcagcaaggccaagggccagcctagggaaccccaagtctgtacactgcctcctagccgcgaggaaatgaccaagaaccaggtgtccctgagctgcgccgtgaagggcttttacccttccgatatcgccgtggaatgggagagcaatggccagcctgagaacaactacaagacaacccctcctgtgctggacagcgacggctcattcttcctggtgtccaagctgacagtggacaagagcagatggcagcagggcaacgtgttcagctgctctgtgctgcacgaagccctgcacagccactacacccagaagtccctgtctctgagccccggcaagtgataa

SEQ ID NO: 705 - RNA, 1638 nt, synthetic construct
  source 1..1638: mol_type = other RNA
atggattggatctggcgcatcctgtttctcgtgggagctgccacaggcgcccactctgattttgtgctgacacagtctccccacagcctgagcgttacacctggcgagtctgccagcatcagctgcaagtctagccactctctgatccacggcgaccggaacaactacctggcttggtacgtgcagaagcccggcagatctcctcagctgctgatctacctggccagcagcagagcttctggcgtgcccgatagattttctggcagcggcagcgacaaggacttcaccctgaagatctccagagtggaaaccgaggacgtgggcacctactactgtatgcagggcagagagagcccctggacatttggccagggcaccaaggtggacatcaaaggcggcggaggaagcggaggcggaggttctggtggcggaggctcaggcggtggcggatctcaagttcatctgacacagagcggccctgaagtgcggaagcctggcacaagcgtgaaggtgtcctgtaaagcccctggcaacaccctgaaaacctacgacctgcactgggtccgatctgtgcctggacagggactgcaatggatgggctggattagccacgagggcgacaagaaagtgatcgtggaacggttcaaggccaaagtgaccatcgactgggacagaagcaccaacaccgcctacctgcagctgagcggactgacatctggcgataccgccgtgtactactgtgccaagggcagcaagcaccggctgagagattacgccctgtacgacgatgacggcgccctgaattgggccgtcgatgtggactacctgagcaacctggaattctggggccagggaacagccgtgacagtgtcttccggcggaggtggaagtggtggtggcggtagcggaggcggtgggtccggaggtggtggatctgaacctaagagcagcgacaagacccacacctgtcctccatgtcctgctccagaactgctggccggaccttccgtgttcctgtttcctccaaagcctaaggacaccctgatgatcagcagaacccctgaagtgacctgcgtggtggtggatgtgtctcacgaggaccccgaagtgaagttcaattggtacgtggacggcgtggaagtgcacaatgccaagaccaagcctagagaggaacagtacaacagcacctacagagtggtgtccgtgctgaccgtgctgcaccaggattggctgaacggcaaagagtacaagtgcaaggtgtccaacaaggccctgcctctgcctgaggaaaagaccatcagcaaggccaagggccagcctagggaaccccaagtctgtacactgcctcctagccgcgaggaaatgaccaagaaccaggtgtccctgagctgcgccgtgaagggcttttacccttccgatatcgccgtggaatgggagagcaatggccagcctgagaacaactacaagacaacccctcctgtgctggacagcgacggctcattcttcctggtgtccaagctgacagtggacaagagcagatggcagcagggcaacgtgttcagctgctctgtgctgcacgaagccctgcacagccactacacccagaagtccctgtctctgagccccggcaagtgataa

SEQ ID NO: 706 - RNA, 1638 nt, synthetic construct
  source 1..1638: mol_type = other RNA
atggattggatctggcgcatcctgtttctcgtgggagctgccacaggcgcccactctgattttgtgctgacacagtctccccacagcctgagcgttacacctggcgagtctgccagcatcagctgcaagtctagccactctctgatccacggcgaccggaacaactacctggcttggtacgtgcagaagcccggcagatctcctcagctgctgatctacctggccagcagcagagcttctggcgtgcccgatagattttctggcagcggcagcgacaaggacttcaccctgaagatctccagagtggaaaccgaggacgtgggcacctactactgtatgcagggcagagagagcccctggacatttggccagggcaccaaggtggacatcaaaggcggcggaggaagcggaggcggaggttctggtggcggaggctcaggcggtggcggatctcaagttcatctgacacagagcggccctgaagtgcggaagcctggcacaagcgtgaaggtgtcctgtaaagcccctggcaacaccctgaaaacctacgacctgcactgggtccgatctgtgcctggacagggactgcaatggatgggctggattagccacgagggcgacaagaaagtgatcgtggaacggttcaaggccaaagtgaccatcgactgggacagaagcaccaacaccgcctacctgcagctgagcggactgacatctggcgataccgccgtgtactactgtgccaagggcagcaagcaccggctgagagattacgccctgtacgacgatgacggcgccctgaattgggccgtcgatgtggactacctgagcaacctggaattctggggccagggaacagccgtgacagtgtcttccggcggaggtggaagtggtggtggcggtagcggaggcggtgggtccggaggtggtggatctgaacctaagagcagcgacaagacccacacctgtcctccatgtcctgctccagaactgctggccggaccttccgtgttcctgtttcctccaaagcctaaggacaccctgatgatcagcagaacccctgaagtgacctgcgtggtggtggatgtgtctcacgaggaccctgaagtgaagttcaattggtacgtggacggcgtggaagtgcacaacgccaagaccaagcctagagaggaacagtacaacagcacctacagagtggtgtccgtgctgaccgtgctgcaccaggattggctgaacggcaaagagtacaagtgcaaggtgtccaacaaggccctgcctgcccctgaggaaaagaccatcagcaaggccaagggccagcctagggaaccccaagtctgtacactgcctcctagccgcgaggaaatgaccaagaaccaggtgtccctgagctgcgccgtgaagggcttttacccttccgatatcgccgtggaatgggagagcaatggccagcctgagaacaactacaagacaacccctcctgtgctggacagcgacggctcattcttcctggtgtccaagctgacagtggacaagagcagatggcagcagggcaacgtgttcagctgctctgtgctgcacgaagccctgcacagccactacacccagaagtccctgtctctgagccccggcaagtgataa

SEQ ID NO: 707 - RNA, 1638 nt, synthetic construct
  source 1..1638: mol_type = other RNA
atggattggatctggcgcatcctgtttctcgtgggagctgccacaggcgcccactctgattttgtgctgacacagtctccccacagcctgagcgttacacctggcgagtctgccagcatcagctgcaagtctagccactctctgatccacggcgaccggaacaactacctggcttggtacgtgcagaagcccggcagatctcctcagctgctgatctacctggccagcagcagagcttctggcgtgcccgatagattttctggcagcggcagcgacaaggacttcaccctgaagatctccagagtggaaaccgaggacgtgggcacctactactgtatgcagggcagagagagcccctggacatttggccagggcaccaaggtggacatcaaaggcggcggaggaagcggaggcggaggttctggtggcggaggctcaggcggtggcggatctcaagttcatctgacacagagcggccctgaagtgcggaagcctggcacaagcgtgaaggtgtcctgtaaagcccctggcaacaccctgaaaacctacgacctgcactgggtccgatctgtgcctggacagggactgcaatggatgggctggattagccacgagggcgacaagaaagtgatcgtggaacggttcaaggccaaagtgaccatcgactgggacagaagcaccaacaccgcctacctgcagctgagcggactgacatctggcgataccgccgtgtactactgtgccaagggcagcaagcaccggctgagagattacgccctgtacgacgatgacggcgccctgaattgggccgtcgatgtggactacctgagcaacctggaattctggggccagggaacagccgtgacagtgtcttccggcggaggtggaagtggtggtggcggtagcggaggcggtgggtccggaggtggtggatctgaacctaagagcagcgacaagacccacacctgtcctccatgtcctgctccagaactgctggccggaccttccgtgttcctgtttcctccaaagcctaaggacaccctgatgatcagcagaacccctgaagtgacctgcgtggtggtggatgtgtctcacgaggaccctgaagtgaagttcaattggtacgtggacggcgtggaagtgcacaacgccaagaccaagcctagagaggaacagtacaacagcacctacagagtggtgtccgtgctgaccgtgctgcaccaggattggctgaacggcaaagagtacaagtgcaaggtgtccaacaaggccctgcctgcccctatcgaaaagaccatcagcaaggccaagggccagcctagggaaccccaagtctgtacactgcctcctagccgcgaggaaatgaccaagaaccaggtgtccctgagctgcgccgtgaagggcttttacccttccgatatcgccgtggaatgggagagcaatggccagcctgagaacaactacaagacaacccctcctgtgctggacagcgacggctcattcttcctggtgtccaagctgacagtggacaagagcagatggcagcagggcaacgtgttcagctgctctgtgctgcacgaagccctgcacagccactacacccagaagtccctgtctctgagccccggcaagtgataa

SEQ ID NO: 708 - RNA, 1638 nt, synthetic construct
  source 1..1638: mol_type = other RNA
atggattggatctggcgcatcctgtttctcgtgggagctgccacaggcgcccactctgattttgtgctgacacagtctccccacagcctgagcgttacacctggcgagtctgccagcatcagctgcaagtctagccactctctgatccacggcgaccggaacaactacctggcttggtacgtgcagaagcccggcagatctcctcagctgctgatctacctggccagcagcagagcttctggcgtgcccgatagattttctggcagcggcagcgacaaggacttcaccctgaagatctccagagtggaaaccgaggacgtgggcacctactactgtatgcagggcagagagagcccctggacatttggccagggcaccaaggtggacatcaaaggcggcggaggaagcggaggcggaggttctggtggcggaggctcaggcggtggcggatctcaagttcatctgacacagagcggccctgaagtgcggaagcctggcacaagcgtgaaggtgtcctgtaaagcccctggcaacaccctgaaaacctacgacctgcactgggtccgatctgtgcctggacagggactgcaatggatgggctggattagccacgagggcgacaagaaagtgatcgtggaacggttcaaggccaaagtgaccatcgactgggacagaagcaccaacaccgcctacctgcagctgagcggactgacatctggcgataccgccgtgtactactgtgccaagggcagcaagcaccggctgagagattacgccctgtacgacgatgacggcgccctgaattgggccgtcgatgtggactacctgagcaacctggaattctggggccagggaacagccgtgacagtgtcttccggcggaggtggaagtggtggtggcggtagcggaggcggtgggtccggaggtggtggatctgaacctaagagcagcgacaagacccacacctgtcctccatgtcctgctccagaactgctgggcggaccttccgtgttcctgtttcctccaaagcctaaggacaccctgatgatcagcagaacccctgaagtgacctgcgtggtggtggatgtgtctcacgaggaccctgaagtgaagttcaattggtacgtggacggcgtggaagtgcacaacgccaagaccaagcctagagaggaacagtacaacagcacctacagagtggtgtccgtgctgaccgtgctgcaccaggattggctgaacggcaaagagtacaagtgcaaggtgtccaacaaggccctgcctgcccctgaggaaaagaccatcagcaaggccaagggccagcctagggaaccccaagtctgtacactgcctcctagccgcgaggaaatgaccaagaaccaggtgtccctgagctgcgccgtgaagggcttttacccttccgatatcgccgtggaatgggagagcaatggccagcctgagaacaactacaagacaacccctcctgtgctggacagcgacggctcattcttcctggtgtccaagctgacagtggacaagagcagatggcagcagggcaacgtgttcagctgctctgtgctgcacgaagccctgcacagccactacacccagaagtccctgtctctgagccccggcaagtgataa

SEQ ID NO: 709 - RNA, 1638 nt, synthetic construct
  source 1..1638: mol_type = other RNA
atggattggatctggcgcatcctgtttctcgtgggagctgccacaggcgcccactctgattttgtgctgacacagtctccccacagcctgagcgttacacctggcgagtctgccagcatcagctgcaagtctagccactctctgatccacggcgaccggaacaactacctggcttggtacgtgcagaagcccggcagatctcctcagctgctgatctacctggccagcagcagagcttctggcgtgcccgatagattttctggcagcggcagcgacaaggacttcaccctgaagatctccagagtggaaaccgaggacgtgggcacctactactgtatgcagggcagagagagcccctggacatttggccagggcaccaaggtggacatcaaaggcggcggaggaagcggaggcggaggttctggtggcggaggctcaggcggtggcggatctcaagttcatctgacacagagcggccctgaagtgcggaagcctggcacaagcgtgaaggtgtcctgtaaagcccctggcaacaccctgaaaacctacgacctgcactgggtccgatctgtgcctggacagggactgcaatggatgggctggattagccacgagggcgacaagaaagtgatcgtggaacggttcaaggccaaagtgaccatcgactgggacagaagcaccaacaccgcctacctgcagctgagcggactgacatctggcgataccgccgtgtactactgtgccaagggcagcaagcaccggctgagagattacgccctgtacgacgatgacggcgccctgaattgggccgtcgatgtggactacctgagcaacctggaattctggggccagggaacagccgtgacagtgtcttccggcggaggtggaagtggtggtggcggtagcggaggcggtgggtccggaggtggtggatctgaacctaagagcagcgacaagacccacacctgtcctccatgtcctgctccagaactgctcggcggaccttccgtgttcctgtttcctccaaagcctaaggacaccctgatgatcagcagaacccctgaagtgacctgcgtggtggtggatgtgtctcacgaggaccccgaagtgaagttcaattggtacgtggacggcgtggaagtgcacaacgccaagaccaagcctagagaggaacagtacaacagcacctacagagtggtgtccgtgctgacagtgctgcaccaggattggctgaacggcaaagagtacaagtgcaaggtgtccaacaaggccctgcctgctcctatcgagaaaaccatcagcaaggccaagggccagcctagggaaccccaggtttacaccctgcctccatgccgcgaggaaatgaccaagaaccaggtgtccctgtggtgcctcgtgaagggcttctacccttccgatatcgccgtggaatgggagagcaatggccagcctgagaacaactacaagacaacccctcctgtgctggacagcgacggctcattcttcctgtacagcaagctgaccgtggacaagtccagatggcagcagggcaacgtgttcagctgtagcgtgctgcacgaagccctgcacagccactacacccagaagtccctgtctctgagccccggcaagtgataa

SEQ ID NO: 710 - RNA, 1638 nt, synthetic construct
  source 1..1638: mol_type = other RNA
atggattggatctggcgcatcctgtttctcgtgggagctgccacaggcgcccactctgattttgtgctgacacagtctccccacagcctgagcgttacacctggcgagtctgccagcatcagctgcaagtctagccactctctgatccacggcgaccggaacaactacctggcttggtacgtgcagaagcccggcagatctcctcagctgctgatctacctggccagcagcagagcttctggcgtgcccgatagattttctggcagcggcagcgacaaggacttcaccctgaagatctccagagtggaaaccgaggacgtgggcacctactactgtatgcagggcagagagagcccctggacatttggccagggcaccaaggtggacatcaaaggcggcggaggaagcggaggcggaggttctggtggcggaggctcaggcggtggcggatctcaagttcatctgacacagagcggccctgaagtgcggaagcctggcacaagcgtgaaggtgtcctgtaaagcccctggcaacaccctgaaaacctacgacctgcactgggtccgatctgtgcctggacagggactgcaatggatgggctggattagccacgagggcgacaagaaagtgatcgtggaacggttcaaggccaaagtgaccatcgactgggacagaagcaccaacaccgcctacctgcagctgagcggactgacatctggcgataccgccgtgtactactgtgccaagggcagcaagcaccggctgagagattacgccctgtacgacgatgacggcgccctgaattgggccgtcgatgtggactacctgagcaacctggaattctggggccagggaacagccgtgacagtgtcttccggcggaggtggaagtggtggtggcggtagcggaggcggtgggtccggaggtggtggatctgaacctaagagcagcgacaagacccacacctgtcctccatgtcctgctccagaactgctggccggaccttccgtgttcctgtttcctccaaagcctaaggacaccctgatgatcagcagaacccctgaagtgacctgcgtggtggtggatgtgtctcacgaggaccccgaagtgaagttcaattggtacgtggacggcgtggaagtgcacaatgccaagaccaagcctagagaggaacagtacaacagcacctacagagtggtgtccgtgctgaccgtgctgcaccaggattggctgaacggcaaagagtacaagtgcaaggtgtccaacaaggccctgcctctgcctgaggaaaagaccatcagcaaggccaagggccagcctagggaaccccaggtttacaccctgcctccatgccgcgaggaaatgaccaagaaccaggtgtccctgtggtgcctcgtgaagggcttctacccttccgatatcgccgtggaatgggagagcaatggccagcctgagaacaactacaagacaacccctcctgtgctggacagcgacggctcattcttcctgtacagcaagctgaccgtggacaagtccagatggcagcagggcaacgtgttcagctgtagcgtgctgcacgaagccctgcacagccactacacccagaagtccctgtctctgagccccggcaagtgataa

SEQ ID NO: 711 - RNA, 1638 nt, synthetic construct
  source 1..1638: mol_type = other RNA
atggattggatctggcgcatcctgtttctcgtgggagctgccacaggcgcccactctgattttgtgctgacacagtctccccacagcctgagcgttacacctggcgagtctgccagcatcagctgcaagtctagccactctctgatccacggcgaccggaacaactacctggcttggtacgtgcagaagcccggcagatctcctcagctgctgatctacctggccagcagcagagcttctggcgtgcccgatagattttctggcagcggcagcgacaaggacttcaccctgaagatctccagagtggaaaccgaggacgtgggcacctactactgtatgcagggcagagagagcccctggacatttggccagggcaccaaggtggacatcaaaggcggcggaggaagcggaggcggaggttctggtggcggaggctcaggcggtggcggatctcaagttcatctgacacagagcggccctgaagtgcggaagcctggcacaagcgtgaaggtgtcctgtaaagcccctggcaacaccctgaaaacctacgacctgcactgggtccgatctgtgcctggacagggactgcaatggatgggctggattagccacgagggcgacaagaaagtgatcgtggaacggttcaaggccaaagtgaccatcgactgggacagaagcaccaacaccgcctacctgcagctgagcggactgacatctggcgataccgccgtgtactactgtgccaagggcagcaagcaccggctgagagattacgccctgtacgacgatgacggcgccctgaattgggccgtcgatgtggactacctgagcaacctggaattctggggccagggaacagccgtgacagtgtcttccggcggaggtggaagtggtggtggcggtagcggaggcggtgggtccggaggtggtggatctgaacctaagagcagcgacaagacccacacctgtcctccatgtcctgctccagaactgctggccggaccttccgtgttcctgtttcctccaaagcctaaggacaccctgatgatcagcagaacccctgaagtgacctgcgtggtggtggatgtgtctcacgaggaccctgaagtgaagttcaattggtacgtggacggcgtggaagtgcacaacgccaagaccaagcctagagaggaacagtacaacagcacctacagagtggtgtccgtgctgaccgtgctgcaccaggattggctgaacggcaaagagtacaagtgcaaggtgtccaacaaggccctgcctgcccctgaggaaaagaccatcagcaaggccaagggccagcctagggaaccccaggtttacaccctgcctccatgccgcgaggaaatgaccaagaaccaggtgtccctgtggtgcctcgtgaagggcttctacccttccgatatcgccgtggaatgggagagcaatggccagcctgagaacaactacaagacaacccctcctgtgctggacagcgacggctcattcttcctgtacagcaagctgaccgtggacaagtccagatggcagcagggcaacgtgttcagctgtagcgtgctgcacgaagccctgcacagccactacacccagaagtccctgtctctgagccccggcaagtgataa

SEQ ID NO: 712 - RNA, 1638 nt, synthetic construct
  source 1..1638: mol_type = other RNA
atggattggatctggcgcatcctgtttctcgtgggagctgccacaggcgcccactctgattttgtgctgacacagtctccccacagcctgagcgttacacctggcgagtctgccagcatcagctgcaagtctagccactctctgatccacggcgaccggaacaactacctggcttggtacgtgcagaagcccggcagatctcctcagctgctgatctacctggccagcagcagagcttctggcgtgcccgatagattttctggcagcggcagcgacaaggacttcaccctgaagatctccagagtggaaaccgaggacgtgggcacctactactgtatgcagggcagagagagcccctggacatttggccagggcaccaaggtggacatcaaaggcggcggaggaagcggaggcggaggttctggtggcggaggctcaggcggtggcggatctcaagttcatctgacacagagcggccctgaagtgcggaagcctggcacaagcgtgaaggtgtcctgtaaagcccctggcaacaccctgaaaacctacgacctgcactgggtccgatctgtgcctggacagggactgcaatggatgggctggattagccacgagggcgacaagaaagtgatcgtggaacggttcaaggccaaagtgaccatcgactgggacagaagcaccaacaccgcctacctgcagctgagcggactgacatctggcgataccgccgtgtactactgtgccaagggcagcaagcaccggctgagagattacgccctgtacgacgatgacggcgccctgaattgggccgtcgatgtggactacctgagcaacctggaattctggggccagggaacagccgtgacagtgtcttccggcggaggtggaagtggtggtggcggtagcggaggcggtgggtccggaggtggtggatctgaacctaagagcagcgacaagacccacacctgtcctccatgtcctgctccagaactgctggccggaccttccgtgttcctgtttcctccaaagcctaaggacaccctgatgatcagcagaacccctgaagtgacctgcgtggtggtggatgtgtctcacgaggaccctgaagtgaagttcaattggtacgtggacggcgtggaagtgcacaacgccaagaccaagcctagagaggaacagtacaacagcacctacagagtggtgtccgtgctgaccgtgctgcaccaggattggctgaacggcaaagagtacaagtgcaaggtgtccaacaaggccctgcctgcccctatcgaaaagaccatcagcaaggccaagggccagcctagggaaccccaggtttacaccctgcctccatgccgcgaggaaatgaccaagaaccaggtgtccctgtggtgcctcgtgaagggcttctacccttccgatatcgccgtggaatgggagagcaatggccagcctgagaacaactacaagacaacccctcctgtgctggacagcgacggctcattcttcctgtacagcaagctgaccgtggacaagtccagatggcagcagggcaacgtgttcagctgtagcgtgctgcacgaagccctgcacagccactacacccagaagtccctgtctctgagccccggcaagtgataa

SEQ ID NO: 713 - RNA, 1638 nt, synthetic construct
  source 1..1638: mol_type = other RNA
atggattggatctggcgcatcctgtttctcgtgggagctgccacaggcgcccactctgattttgtgctgacacagtctccccacagcctgagcgttacacctggcgagtctgccagcatcagctgcaagtctagccactctctgatccacggcgaccggaacaactacctggcttggtacgtgcagaagcccggcagatctcctcagctgctgatctacctggccagcagcagagcttctggcgtgcccgatagattttctggcagcggcagcgacaaggacttcaccctgaagatctccagagtggaaaccgaggacgtgggcacctactactgtatgcagggcagagagagcccctggacatttggccagggcaccaaggtggacatcaaaggcggcggaggaagcggaggcggaggttctggtggcggaggctcaggcggtggcggatctcaagttcatctgacacagagcggccctgaagtgcggaagcctggcacaagcgtgaaggtgtcctgtaaagcccctggcaacaccctgaaaacctacgacctgcactgggtccgatctgtgcctggacagggactgcaatggatgggctggattagccacgagggcgacaagaaagtgatcgtggaacggttcaaggccaaagtgaccatcgactgggacagaagcaccaacaccgcctacctgcagctgagcggactgacatctggcgataccgccgtgtactactgtgccaagggcagcaagcaccggctgagagattacgccctgtacgacgatgacggcgccctgaattgggccgtcgatgtggactacctgagcaacctggaattctggggccagggaacagccgtgacagtgtcttccggcggaggtggaagtggtggtggcggtagcggaggcggtgggtccggaggtggtggatctgaacctaagagcagcgacaagacccacacctgtcctccatgtcctgctccagaactgctgggcggaccttccgtgttcctgtttcctccaaagcctaaggacaccctgatgatcagcagaacccctgaagtgacctgcgtggtggtggatgtgtctcacgaggaccctgaagtgaagttcaattggtacgtggacggcgtggaagtgcacaacgccaagaccaagcctagagaggaacagtacaacagcacctacagagtggtgtccgtgctgaccgtgctgcaccaggattggctgaacggcaaagagtacaagtgcaaggtgtccaacaaggccctgcctgcccctgaggaaaagaccatcagcaaggccaagggccagcctagggaaccccaggtttacaccctgcctccatgccgcgaggaaatgaccaagaaccaggtgtccctgtggtgcctcgtgaagggcttctacccttccgatatcgccgtggaatgggagagcaatggccagcctgagaacaactacaagacaacccctcctgtgctggacagcgacggctcattcttcctgtacagcaagctgaccgtggacaagtccagatggcagcagggcaacgtgttcagctgtagcgtgctgcacgaagccctgcacagccactacacccagaagtccctgtctctgagccccggcaagtgataa

SEQ ID NO: 714 - RNA, 1638 nt, synthetic construct; identical to SEQ ID NO: 698
  source 1..1638: mol_type = other RNA

SEQ ID NO: 715 - RNA, 1638 nt, synthetic construct; identical to SEQ ID NO: 699
  source 1..1638: mol_type = other RNA

SEQ ID NO: 716 - RNA, 1638 nt, synthetic construct; identical to SEQ ID NO: 700
  source 1..1638: mol_type = other RNA

SEQ ID NO: 717 - RNA, 1638 nt, synthetic construct; identical to SEQ ID NO: 701
  source 1..1638: mol_type = other RNA

SEQ ID NO: 718 - RNA, 1638 nt, synthetic construct; identical to SEQ ID NO: 702
  source 1..1638: mol_type = other RNA

SEQ ID NO: 719 - RNA, 1638 nt, synthetic construct; identical to SEQ ID NO: 703
  source 1..1638: mol_type = other RNA

SEQ ID NO: 720 - RNA, 1638 nt, synthetic construct; identical to SEQ ID NO: 704
  source 1..1638: mol_type = other RNA

SEQ ID NO: 721 - RNA, 1638 nt, synthetic construct; identical to SEQ ID NO: 705
  source 1..1638: mol_type = other RNA

SEQ ID NO: 722 - RNA, 1638 nt, synthetic construct; identical to SEQ ID NO: 706
  source 1..1638: mol_type = other RNA

SEQ ID NO: 723 - RNA, 1638 nt, synthetic construct; identical to SEQ ID NO: 707
  source 1..1638: mol_type = other RNA

SEQ ID NO: 724 - RNA, 1638 nt, synthetic construct; identical to SEQ ID NO: 708
  source 1..1638: mol_type = other RNA

SEQ ID NO: 725 - RNA, 1638 nt, synthetic construct; identical to SEQ ID NO: 709
  source 1..1638: mol_type = other RNA

SEQ ID NO: 726 - RNA, 1638 nt, synthetic construct; identical to SEQ ID NO: 710
  source 1..1638: mol_type = other RNA

SEQ ID NO: 727 - RNA, 1638 nt, synthetic construct; identical to SEQ ID NO: 711
  source 1..1638: mol_type = other RNA

SEQ ID NO: 728 - RNA, 1638 nt, synthetic construct; identical to SEQ ID NO: 712
  source 1..1638: mol_type = other RNA

SEQ ID NO: 729 - RNA, 1638 nt, synthetic construct; identical to SEQ ID NO: 713
  source 1..1638: mol_type = other RNA

SEQ ID NO: 730 - RNA, 1638 nt, synthetic construct
  source 1..1638: mol_type = other RNA
atggattggatctggcgcatcctgtttctcgtgggagctgccacaggcgcccactctgattttgtgctgacacagtctccccacagcctgagcgttacacctggcgagtctgccagcatcagctgcaagtctagccactctctgatccacggcgaccggaacaactacctggcttggtacgtgcagaagcccggcagatctcctcagctgctgatctacctggccagcagcagagcttctggcgtgcccgatagattttctggcagcggcagcgacaaggacttcaccctgaagatctccagagtggaaaccgaggacgtgggcacctactactgtatgcagggcagagagagcccctggacatttggccagggcaccaaggtggacatcaaaggcggcggaggaagcggaggcggaggttctggtggcggaggctcaggcggtggcggatctcaagttcatctgacacagagcggccctgaagtgcggaagcctggcacaagcgtgaaggtgtcctgtaaagcccctggcaacaccctgaaaacctacgacctgcactgggtccgatctgtgcctggacagggactgcaatggatgggctggattagccacgagggcgacaagaaagtgatcgtggaacggttcaaggccaaagtgaccatcgactgggacagaagcaccaacaccgcctacctgcagctgagcggactgacatctggcgataccgccgtgtactactgtgccaagggcagcaagcaccggctgagagattacgccctgtacgacgatgacggcgccctgaattgggccgtcgatgtggactacctgagcaacctggaattctggggccagggaacagccgtgacagtgtcttccggcggaggtggaagtggtggtggcggtagcggaggcggtgggtccggaggtggtggatctgaacctaagagcagcgacaagacccacacctgtcctccatgtcctgctccagaactgctcggcggaccttccgtgttcctgtttcctccaaagcctaaggacaccctgatgatcagcagaacccctgaagtgacctgcgtggtggtggatgtgtctcacgaggaccccgaagtgaagttcaattggtacgtggacggcgtggaagtgcacaacgccaagaccaagcctagagaggaacagtacaacagcacctacagagtggtgtccgtgctgacagtgctgcaccaggattggctgaacggcaaagagtacaagtgcaaggtgtccaacaaggccctgcctgctcctatcgagaaaaccatcagcaaggccaagggccagcctagggaaccccaggtttacacactgcctccaagccgcgacgaactgaccaagaaccaggtgtccctgacctgcctcgtgaagggcttctacccttccgatatcgccgtggaatgggagagcaatggccagcctgagaacaactacaagacaacccctcctgtgctggacagcgacggctcattcttcctgtacagcaagctgactgtggataagtcccggtggcagcagggcaacgtgttcagctgttctgtgatgcacgaagccctgcacaaccactacacccagaaaagcctgtctctgagccccggcaagtgataa

SEQ ID NO: 731 - RNA, 1638 nt, synthetic construct
  source 1..1638: mol_type = other RNA
atggattggatctggcgcatcctgtttctcgtgggagctgccacaggcgcccactctgattttgtgctgacacagtctccccacagcctgagcgttacacctggcgagtctgccagcatcagctgcaagtctagccactctctgatccacggcgaccggaacaactacctggcttggtacgtgcagaagcccggcagatctcctcagctgctgatctacctggccagcagcagagcttctggcgtgcccgatagattttctggcagcggcagcgacaaggacttcaccctgaagatctccagagtggaaaccgaggacgtgggcacctactactgtatgcagggcagagagagcccctggacatttggccagggcaccaaggtggacatcaaaggcggcggaggaagcggaggcggaggttctggtggcggaggctcaggcggtggcggatctcaagttcatctgacacagagcggccctgaagtgcggaagcctggcacaagcgtgaaggtgtcctgtaaagcccctggcaacaccctgaaaacctacgacctgcactgggtccgatctgtgcctggacagggactgcaatggatgggctggattagccacgagggcgacaagaaagtgatcgtggaacggttcaaggccaaagtgaccatcgactgggacagaagcaccaacaccgcctacctgcagctgagcggactgacatctggcgataccgccgtgtactactgtgccaagggcagcaagcaccggctgagagattacgccctgtacgacgatgacggcgccctgaattgggccgtcgatgtggactacctgagcaacctggaattctggggccagggaacagccgtgacagtgtcttccggcggaggtggaagtggtggtggcggtagcggaggcggtgggtccggaggtggtggatctgaacctaagagcagcgacaagacccacacctgtcctccatgtcctgctccagaactgctcggcggaccttccgtgttcctgtttcctccaaagcctaaggacaccctgatgatcagcagaacccctgaagtgacctgcgtggtggtggatgtgtctcacgaggaccccgaagtgaagttcaattggtacgtggacggcgtggaagtgcacaacgccaagaccaagcctagagaggaacagtacaacagcacctacagagtggtgtccgtgctgacagtgctgcaccaggattggctgaacggcaaagagtacaagtgcaaggtgtccaacaaggccctgcctgctcctatcgagaaaaccatcagcaaggccaagggccagcctagggaaccccaggtttacacactgcctccaagccgcgacgaactgaccaagaaccaggtgtccctgacctgcctcgtgaagggcttctacccttccgatatcgccgtggaatgggagagcaatggccagcctgagaacaactacaagacaacccctcctgtgctggacagcgacggctcattcttcctgtacagcaagctgaccgtggacaagtccagatggcagcagggcaacgtgttcagctgtagcgtgctgcacgaagccctgcacagccactacacccagaaaagcctgtctctgagccccggcaaatgataa

SEQ ID NO: 732 - RNA, 1638 nt, synthetic construct
  source 1..1638: mol_type = other RNA
atggattggatctggcgcatcctgtttctcgtgggagctgccacaggcgcccactctgattttgtgctgacacagtctccccacagcctgagcgttacacctggcgagtctgccagcatcagctgcaagtctagccactctctgatccacggcgaccggaacaactacctggcttggtacgtgcagaagcccggcagatctcctcagctgctgatctacctggccagcagcagagcttctggcgtgcccgatagattttctggcagcggcagcgacaaggacttcaccctgaagatctccagagtggaaaccgaggacgtgggcacctactactgtatgcagggcagagagagcccctggacatttggccagggcaccaaggtggacatcaaaggcggcggaggaagcggaggcggaggttctggtggcggaggctcaggcggtggcggatctcaagttcatctgacacagagcggccctgaagtgcggaagcctggcacaagcgtgaaggtgtcctgtaaagcccctggcaacaccctgaaaacctacgacctgcactgggtccgatctgtgcctggacagggactgcaatggatgggctggattagccacgagggcgacaagaaagtgatcgtggaacggttcaaggccaaagtgaccatcgactgggacagaagcaccaacaccgcctacctgcagctgagcggactgacatctggcgataccgccgtgtactactgtgccaagggcagcaagcaccggctgagagattacgccctgtacgacgatgacggcgccctgaattgggccgtcgatgtggactacctgagcaacctggaattctggggccagggaacagccgtgacagtgtcttccggcggaggtggaagtggtggtggcggtagcggaggcggtgggtccggaggtggtggatctgaacctaagagcagcgacaagacccacacctgtcctccatgtcctgctccagaactgctggccggaccttccgtgttcctgtttcctccaaagcctaaggacaccctgatgatcagcagaacccctgaagtgacctgcgtggtggtggatgtgtctcacgaggaccccgaagtgaagttcaattggtacgtggacggcgtggaagtgcacaatgccaagaccaagcctagagaggaacagtacaacagcacctacagagtggtgtccgtgctgaccgtgctgcaccaggattggctgaacggcaaagagtacaagtgcaaggtgtccaacaaggccctgcctctgcctgaggaaaagaccatcagcaaggccaagggccagcctagggaaccccaggtttacacactgcctccaagccgcgacgaactgaccaagaaccaggtgtccctgacctgcctcgtgaagggcttctacccttccgatatcgccgtggaatgggagagcaatggccagcctgagaacaactacaagacaacccctcctgtgctggacagcgacggctcattcttcctgtacagcaagctgaccgtggacaagtccagatggcagcagggcaacgtgttcagctgtagcgtgctgcacgaagccctgcacagccactacacccagaaaagcctgtctctgagccccggcaaatgataa

SEQ ID NO: 733 - RNA, 1638 nt, synthetic construct
  source 1..1638: mol_type = other RNA
atggattggatctggcgcatcctgtttctcgtgggagctgccacaggcgcccactctgattttgtgctgacacagtctccccacagcctgagcgttacacctggcgagtctgccagcatcagctgcaagtctagccactctctgatccacggcgaccggaacaactacctggcttggtacgtgcagaagcccggcagatctcctcagctgctgatctacctggccagcagcagagcttctggcgtgcccgatagattttctggcagcggcagcgacaaggacttcaccctgaagatctccagagtggaaaccgaggacgtgggcacctactactgtatgcagggcagagagagcccctggacatttggccagggcaccaaggtggacatcaaaggcggcggaggaagcggaggcggaggttctggtggcggaggctcaggcggtggcggatctcaagttcatctgacacagagcggccctgaagtgcggaagcctggcacaagcgtgaaggtgtcctgtaaagcccctggcaacaccctgaaaacctacgacctgcactgggtccgatctgtgcctggacagggactgcaatggatgggctggattagccacgagggcgacaagaaagtgatcgtggaacggttcaaggccaaagtgaccatcgactgggacagaagcaccaacaccgcctacctgcagctgagcggactgacatctggcgataccgccgtgtactactgtgccaagggcagcaagcaccggctgagagattacgccctgtacgacgatgacggcgccctgaattgggccgtcgatgtggactacctgagcaacctggaattctggggccagggaacagccgtgacagtgtcttccggcggaggtggaagtggtggtggcggtagcggaggcggtgggtccggaggtggtggatctgaacctaagagcagcgacaagacccacacctgtcctccatgtcctgctccagaactgctggccggaccttccgtgttcctgtttcctccaaagcctaaggacaccctgatgatcagcagaacccctgaagtgacctgcgtggtggtggatgtgtctcacgaggaccctgaagtgaagttcaattggtacgtggacggcgtggaagtgcacaacgccaagaccaagcctagagaggaacagtacaacagcacctacagagtggtgtccgtgctgaccgtgctgcaccaggattggctgaacggcaaagagtacaagtgcaaggtgtccaacaaggccctgcctgcccctgaggaaaagaccatcagcaaggccaagggccagcctagggaaccccaggtttacacactgcctccaagccgcgacgaactgaccaagaaccaggtgtccctgacctgcctcgtgaagggcttctacccttccgatatcgccgtggaatgggagagcaatggccagcctgagaacaactacaagacaacccctcctgtgctggacagcgacggctcattcttcctgtacagcaagctgaccgtggacaagtccagatggcagcagggcaacgtgttcagctgtagcgtgctgcacgaagccctgcacagccactacacccagaaaagcctgtctctgagccccggcaaatgataa

SEQ ID NO: 734 - RNA, 1638 nt, synthetic construct
  source 1..1638: mol_type = other RNA
atggattggatctggcgcatcctgtttctcgtgggagctgccacaggcgcccactctgattttgtgctgacacagtctccccacagcctgagcgttacacctggcgagtctgccagcatcagctgcaagtctagccactctctgatccacggcgaccggaacaactacctggcttggtacgtgcagaagcccggcagatctcctcagctgctgatctacctggccagcagcagagcttctggcgtgcccgatagattttctggcagcggcagcgacaaggacttcaccctgaagatctccagagtggaaaccgaggacgtgggcacctactactgtatgcagggcagagagagcccctggacatttggccagggcaccaaggtggacatcaaaggcggcggaggaagcggaggcggaggttctggtggcggaggctcaggcggtggcggatctcaagttcatctgacacagagcggccctgaagtgcggaagcctggcacaagcgtgaaggtgtcctgtaaagcccctggcaacaccctgaaaacctacgacctgcactgggtccgatctgtgcctggacagggactgcaatggatgggctggattagccacgagggcgacaagaaagtgatcgtggaacggttcaaggccaaagtgaccatcgactgggacagaagcaccaacaccgcctacctgcagctgagcggactgacatctggcgataccgccgtgtactactgtgccaagggcagcaagcaccggctgagagattacgccctgtacgacgatgacggcgccctgaattgggccgtcgatgtggactacctgagcaacctggaattctggggccagggaacagccgtgacagtgtcttccggcggaggtggaagtggtggtggcggtagcggaggcggtgggtccggaggtggtggatctgaacctaagagcagcgacaagacccacacctgtcctccatgtcctgctccagaactgctggccggaccttccgtgttcctgtttcctccaaagcctaaggacaccctgatgatcagcagaacccctgaagtgacctgcgtggtggtggatgtgtctcacgaggaccctgaagtgaagttcaattggtacgtggacggcgtggaagtgcacaacgccaagaccaagcctagagaggaacagtacaacagcacctacagagtggtgtccgtgctgaccgtgctgcaccaggattggctgaacggcaaagagtacaagtgcaaggtgtccaacaaggccctgcctgcccctatcgaaaagaccatcagcaaggccaagggccagcctagggaaccccaggtttacacactgcctccaagccgcgacgaactgaccaagaaccaggtgtccctgacctgcctcgtgaagggcttctacccttccgatatcgccgtggaatgggagagcaatggccagcctgagaacaactacaagacaacccctcctgtgctggacagcgacggctcattcttcctgtacagcaagctgaccgtggacaagtccagatggcagcagggcaacgtgttcagctgtagcgtgctgcacgaagccctgcacagccactacacccagaaaagcctgtctctgagccccggcaaatgataa

SEQ ID NO: 735 - RNA, 1638 nt, synthetic construct
  source 1..1638: mol_type = other RNA
atggattggatctggcgcatcctgtttctcgtgggagctgccacaggcgcccactctgattttgtgctgacacagtctccccacagcctgagcgttacacctggcgagtctgccagcatcagctgcaagtctagccactctctgatccacggcgaccggaacaactacctggcttggtacgtgcagaagcccggcagatctcctcagctgctgatctacctggccagcagcagagcttctggcgtgcccgatagattttctggcagcggcagcgacaaggacttcaccctgaagatctccagagtggaaaccgaggacgtgggcacctactactgtatgcagggcagagagagcccctggacatttggccagggcaccaaggtggacatcaaaggcggcggaggaagcggaggcggaggttctggtggcggaggctcaggcggtggcggatctcaagttcatctgacacagagcggccctgaagtgcggaagcctggcacaagcgtgaaggtgtcctgtaaagcccctggcaacaccctgaaaacctacgacctgcactgggtccgatctgtgcctggacagggactgcaatggatgggctggattagccacgagggcgacaagaaagtgatcgtggaacggttcaaggccaaagtgaccatcgactgggacagaagcaccaacaccgcctacctgcagctgagcggactgacatctggcgataccgccgtgtactactgtgccaagggcagcaagcaccggctgagagattacgccctgtacgacgatgacggcgccctgaattgggccgtcgatgtggactacctgagcaacctggaattctggggccagggaacagccgtgacagtgtcttccggcggaggtggaagtggtggtggcggtagcggaggcggtgggtccggaggtggtggatctgaacctaagagcagcgacaagacccacacctgtcctccatgtcctgctccagaactgctgggcggaccttccgtgttcctgtttcctccaaagcctaaggacaccctgatgatcagcagaacccctgaagtgacctgcgtggtggtggatgtgtctcacgaggaccctgaagtgaagttcaattggtacgtggacggcgtggaagtgcacaacgccaagaccaagcctagagaggaacagtacaacagcacctacagagtggtgtccgtgctgaccgtgctgcaccaggattggctgaacggcaaagagtacaagtgcaaggtgtccaacaaggccctgcctgcccctgaggaaaagaccatcagcaaggccaagggccagcctagggaaccccaggtttacacactgcctccaagccgcgacgaactgaccaagaaccaggtgtccctgacctgcctcgtgaagggcttctacccttccgatatcgccgtggaatgggagagcaatggccagcctgagaacaactacaagacaacccctcctgtgctggacagcgacggctcattcttcctgtacagcaagctgaccgtggacaagtccagatggcagcagggcaacgtgttcagctgtagcgtgctgcacgaagccctgcacagccactacacccagaaaagcctgtctctgagccccggcaaatgataa

SEQ ID NO: 736 - RNA, 1638 nt, synthetic construct
  source 1..1638: mol_type = other RNA
atggattggatctggcgcatcctgtttctcgtgggagctgccacaggcgcccactctgattttgtgctgacacagtctccccacagcctgagcgttacacctggcgagtctgccagcatcagctgcaagtctagccactctctgatccacggcgaccggaacaactacctggcttggtacgtgcagaagcccggcagatctcctcagctgctgatctacctggccagcagcagagcttctggcgtgcccgatagattttctggcagcggcagcgacaaggacttcaccctgaagatctccagagtggaaaccgaggacgtgggcacctactactgtatgcagggcagagagagcccctggacatttggccagggcaccaaggtggacatcaaaggcggcggaggaagcggaggcggaggttctggtggcggaggctcaggcggtggcggatctcaagttcatctgacacagagcggccctgaagtgcggaagcctggcacaagcgtgaaggtgtcctgtaaagcccctggcaacaccctgaaaacctacgacctgcactgggtccgatctgtgcctggacagggactgcaatggatgggctggattagccacgagggcgacaagaaagtgatcgtggaacggttcaaggccaaagtgaccatcgactgggacagaagcaccaacaccgcctacctgcagctgagcggactgacatctggcgataccgccgtgtactactgtgccaagggcagcaagcaccggctgagagattacgccctgtacgacgatgacggcgccctgaattgggccgtcgatgtggactacctgagcaacctggaattctggggccagggaacagccgtgacagtgtcttccggcggaggtggaagtggtggtggcggtagcggaggcggtgggtccggaggtggtggatctgaacctaagagcagcgacaagacccacacctgtcctccatgtcctgctccagaactgctcggcggaccttccgtgttcctgtttcctccaaagcctaaggacaccctgatgatcagcagaacccctgaagtgacctgcgtggtggtggatgtgtctcacgaggaccccgaagtgaagttcaattggtacgtggacggcgtggaagtgcacaacgccaagaccaagcctagagaggaacagtacaacagcacctacagagtggtgtccgtgctgacagtgctgcaccaggattggctgaacggcaaagagtacaagtgcaaggtgtccaacaaggccctgcctgctcctatcgagaaaaccatcagcaaggccaagggccagcctcgcgaacctcaagtctgtacactgcctcctagccgcgacgaactgaccaagaaccaggtgtccctgagctgcgccgtgaagggcttttacccttccgatatcgccgtggaatgggagagcaatggccagcctgagaacaactacaagacaacccctcctgtgctggacagcgacggctcattcttcctggtgtccaagctgacagtggacaagagcagatggcagcagggcaacgtgttcagctgcagcgtgctgcatgaagccctgcacagccactacacccagaagtccctgtctctgagccccggcaagtgataa

SEQ ID NO: 737 - RNA, 1638 nt, synthetic construct
  source 1..1638: mol_type = other RNA
atggattggatctggcgcatcctgtttctcgtgggagctgccacaggcgcccactctgattttgtgctgacacagtctccccacagcctgagcgttacacctggcgagtctgccagcatcagctgcaagtctagccactctctgatccacggcgaccggaacaactacctggcttggtacgtgcagaagcccggcagatctcctcagctgctgatctacctggccagcagcagagcttctggcgtgcccgatagattttctggcagcggcagcgacaaggacttcaccctgaagatctccagagtggaaaccgaggacgtgggcacctactactgtatgcagggcagagagagcccctggacatttggccagggcaccaaggtggacatcaaaggcggcggaggaagcggaggcggaggttctggtggcggaggctcaggcggtggcggatctcaagttcatctgacacagagcggccctgaagtgcggaagcctggcacaagcgtgaaggtgtcctgtaaagcccctggcaacaccctgaaaacctacgacctgcactgggtccgatctgtgcctggacagggactgcaatggatgggctggattagccacgagggcgacaagaaagtgatcgtggaacggttcaaggccaaagtgaccatcgactgggacagaagcaccaacaccgcctacctgcagctgagcggactgacatctggcgataccgccgtgtactactgtgccaagggcagcaagcaccggctgagagattacgccctgtacgacgatgacggcgccctgaattgggccgtcgatgtggactacctgagcaacctggaattctggggccagggaacagccgtgacagtgtcttccggcggaggtggaagtggtggtggcggtagcggaggcggtgggtccggaggtggtggatctgaacctaagagcagcgacaagacccacacctgtcctccatgtcctgctccagaactgctggccggaccttccgtgttcctgtttcctccaaagcctaaggacaccctgatgatcagcagaacccctgaagtgacctgcgtggtggtggatgtgtctcacgaggaccccgaagtgaagttcaattggtacgtggacggcgtggaagtgcacaatgccaagaccaagcctagagaggaacagtacaacagcacctacagagtggtgtccgtgctgaccgtgctgcaccaggattggctgaacggcaaagagtacaagtgcaaggtgtccaacaaggccctgcctctgcctgaggaaaagaccatcagcaaggccaagggccagcctcgcgaacctcaagtctgtacactgcctcctagccgcgacgaactgaccaagaaccaggtgtccctgagctgcgccgtgaagggcttttacccttccgatatcgccgtggaatgggagagcaatggccagcctgagaacaactacaagacaacccctcctgtgctggacagcgacggctcattcttcctggtgtccaagctgacagtggacaagagcagatggcagcagggcaacgtgttcagctgcagcgtgctgcatgaagccctgcacagccactacacccagaagtccctgtctctgagccccggcaagtgataa

SEQ ID NO: 738 - RNA, 1638 nt, synthetic construct
  source 1..1638: mol_type = other RNA
atggattggatctggcgcatcctgtttctcgtgggagctgccacaggcgcccactctgattttgtgctgacacagtctccccacagcctgagcgttacacctggcgagtctgccagcatcagctgcaagtctagccactctctgatccacggcgaccggaacaactacctggcttggtacgtgcagaagcccggcagatctcctcagctgctgatctacctggccagcagcagagcttctggcgtgcccgatagattttctggcagcggcagcgacaaggacttcaccctgaagatctccagagtggaaaccgaggacgtgggcacctactactgtatgcagggcagagagagcccctggacatttggccagggcaccaaggtggacatcaaaggcggcggaggaagcggaggcggaggttctggtggcggaggctcaggcggtggcggatctcaagttcatctgacacagagcggccctgaagtgcggaagcctggcacaagcgtgaaggtgtcctgtaaagcccctggcaacaccctgaaaacctacgacctgcactgggtccgatctgtgcctggacagggactgcaatggatgggctggattagccacgagggcgacaagaaagtgatcgtggaacggttcaaggccaaagtgaccatcgactgggacagaagcaccaacaccgcctacctgcagctgagcggactgacatctggcgataccgccgtgtactactgtgccaagggcagcaagcaccggctgagagattacgccctgtacgacgatgacggcgccctgaattgggccgtcgatgtggactacctgagcaacctggaattctggggccagggaacagccgtgacagtgtcttccggcggaggtggaagtggtggtggcggtagcggaggcggtgggtccggaggtggtggatctgaacctaagagcagcgacaagacccacacctgtcctccatgtcctgctccagaactgctggccggaccttccgtgttcctgtttcctccaaagcctaaggacaccctgatgatcagcagaacccctgaagtgacctgcgtggtggtggatgtgtctcacgaggaccctgaagtgaagttcaattggtacgtggacggcgtggaagtgcacaacgccaagaccaagcctagagaggaacagtacaacagcacctacagagtggtgtccgtgctgaccgtgctgcaccaggattggctgaacggcaaagagtacaagtgcaaggtgtccaacaaggccctgcctgcccctgaggaaaagaccatcagcaaggccaagggccagcctcgcgaacctcaagtctgtacactgcctcctagccgcgacgaactgaccaagaaccaggtgtccctgagctgcgccgtgaagggcttttacccttccgatatcgccgtggaatgggagagcaatggccagcctgagaacaactacaagacaacccctcctgtgctggacagcgacggctcattcttcctggtgtccaagctgacagtggacaagagcagatggcagcagggcaacgtgttcagctgcagcgtgctgcatgaagccctgcacagccactacacccagaagtccctgtctctgagccccggcaagtgataa

SEQ ID NO: 739 - RNA, 1638 nt, synthetic construct
  source 1..1638: mol_type = other RNA
atggattggatctggcgcatcctgtttctcgtgggagctgccacaggcgcccactctgattttgtgctgacacagtctccccacagcctgagcgttacacctggcgagtctgccagcatcagctgcaagtctagccactctctgatccacggcgaccggaacaactacctggcttggtacgtgcagaagcccggcagatctcctcagctgctgatctacctggccagcagcagagcttctggcgtgcccgatagattttctggcagcggcagcgacaaggacttcaccctgaagatctccagagtggaaaccgaggacgtgggcacctactactgtatgcagggcagagagagcccctggacatttggccagggcaccaaggtggacatcaaaggcggcggaggaagcggaggcggaggttctggtggcggaggctcaggcggtggcggatctcaagttcatctgacacagagcggccctgaagtgcggaagcctggcacaagcgtgaaggtgtcctgtaaagcccctggcaacaccctgaaaacctacgacctgcactgggtccgatctgtgcctggacagggactgcaatggatgggctggattagccacgagggcgacaagaaagtgatcgtggaacggttcaaggccaaagtgaccatcgactgggacagaagcaccaacaccgcctacctgcagctgagcggactgacatctggcgataccgccgtgtactactgtgccaagggcagcaagcaccggctgagagattacgccctgtacgacgatgacggcgccctgaattgggccgtcgatgtggactacctgagcaacctggaattctggggccagggaacagccgtgacagtgtcttccggcggaggtggaagtggtggtggcggtagcggaggcggtgggtccggaggtggtggatctgaacctaagagcagcgacaagacccacacctgtcctccatgtcctgctccagaactgctggccggaccttccgtgttcctgtttcctccaaagcctaaggacaccctgatgatcagcagaacccctgaagtgacctgcgtggtggtggatgtgtctcacgaggaccctgaagtgaagttcaattggtacgtggacggcgtggaagtgcacaacgccaagaccaagcctagagaggaacagtacaacagcacctacagagtggtgtccgtgctgaccgtgctgcaccaggattggctgaacggcaaagagtacaagtgcaaggtgtccaacaaggccctgcctgcccctatcgaaaagaccatcagcaaggccaagggccagcctcgcgaacctcaagtctgtacactgcctcctagccgcgacgaactgaccaagaaccaggtgtccctgagctgcgccgtgaagggcttttacccttccgatatcgccgtggaatgggagagcaatggccagcctgagaacaactacaagacaacccctcctgtgctggacagcgacggctcattcttcctggtgtccaagctgacagtggacaagagcagatggcagcagggcaacgtgttcagctgcagcgtgctgcatgaagccctgcacagccactacacccagaagtccctgtctctgagccccggcaagtgataa

SEQ ID NO: 740 - RNA, 1638 nt, synthetic construct
  source 1..1638: mol_type = other RNA
atggattggatctggcgcatcctgtttctcgtgggagctgccacaggcgcccactctgattttgtgctgacacagtctccccacagcctgagcgttacacctggcgagtctgccagcatcagctgcaagtctagccactctctgatccacggcgaccggaacaactacctggcttggtacgtgcagaagcccggcagatctcctcagctgctgatctacctggccagcagcagagcttctggcgtgcccgatagattttctggcagcggcagcgacaaggacttcaccctgaagatctccagagtggaaaccgaggacgtgggcacctactactgtatgcagggcagagagagcccctggacatttggccagggcaccaaggtggacatcaaaggcggcggaggaagcggaggcggaggttctggtggcggaggctcaggcggtggcggatctcaagttcatctgacacagagcggccctgaagtgcggaagcctggcacaagcgtgaaggtgtcctgtaaagcccctggcaacaccctgaaaacctacgacctgcactgggtccgatctgtgcctggacagggactgcaatggatgggctggattagccacgagggcgacaagaaagtgatcgtggaacggttcaaggccaaagtgaccatcgactgggacagaagcaccaacaccgcctacctgcagctgagcggactgacatctggcgataccgccgtgtactactgtgccaagggcagcaagcaccggctgagagattacgccctgtacgacgatgacggcgccctgaattgggccgtcgatgtggactacctgagcaacctggaattctggggccagggaacagccgtgacagtgtcttccggcggaggtggaagtggtggtggcggtagcggaggcggtgggtccggaggtggtggatctgaacctaagagcagcgacaagacccacacctgtcctccatgtcctgctccagaactgctgggcggaccttccgtgttcctgtttcctccaaagcctaaggacaccctgatgatcagcagaacccctgaagtgacctgcgtggtggtggatgtgtctcacgaggaccctgaagtgaagttcaattggtacgtggacggcgtggaagtgcacaacgccaagaccaagcctagagaggaacagtacaacagcacctacagagtggtgtccgtgctgaccgtgctgcaccaggattggctgaacggcaaagagtacaagtgcaaggtgtccaacaaggccctgcctgcccctgaggaaaagaccatcagcaaggccaagggccagcctcgcgaacctcaagtctgtacactgcctcctagccgcgacgaactgaccaagaaccaggtgtccctgagctgcgccgtgaagggcttttacccttccgatatcgccgtggaatgggagagcaatggccagcctgagaacaactacaagacaacccctcctgtgctggacagcgacggctcattcttcctggtgtccaagctgacagtggacaagagcagatggcagcagggcaacgtgttcagctgcagcgtgctgcatgaagccctgcacagccactacacccagaagtccctgtctctgagccccggcaagtgataa

SEQ ID NO: 741 - RNA, 1638 nt, synthetic construct
  source 1..1638: mol_type = other RNA
atggattggatctggcgcatcctgtttctcgtgggagctgccacaggcgcccactctgattttgtgctgacacagtctccccacagcctgagcgttacacctggcgagtctgccagcatcagctgcaagtctagccactctctgatccacggcgaccggaacaactacctggcttggtacgtgcagaagcccggcagatctcctcagctgctgatctacctggccagcagcagagcttctggcgtgcccgatagattttctggcagcggcagcgacaaggacttcaccctgaagatctccagagtggaaaccgaggacgtgggcacctactactgtatgcagggcagagagagcccctggacatttggccagggcaccaaggtggacatcaaaggcggcggaggaagcggaggcggaggttctggtggcggaggctcaggcggtggcggatctcaagttcatctgacacagagcggccctgaagtgcggaagcctggcacaagcgtgaaggtgtcctgtaaagcccctggcaacaccctgaaaacctacgacctgcactgggtccgatctgtgcctggacagggactgcaatggatgggctggattagccacgagggcgacaagaaagtgatcgtggaacggttcaaggccaaagtgaccatcgactgggacagaagcaccaacaccgcctacctgcagctgagcggactgacatctggcgataccgccgtgtactactgtgccaagggcagcaagcaccggctgagagattacgccctgtacgacgatgacggcgccctgaattgggccgtcgatgtggactacctgagcaacctggaattctggggccagggaacagccgtgacagtgtcttccggcggaggtggaagtggtggtggcggtagcggaggcggtgggtccggaggtggtggatctgaacctaagagcagcgacaagacccacacctgtcctccatgtcctgctccagaactgctcggcggaccttccgtgttcctgtttcctccaaagcctaaggacaccctgatgatcagcagaacccctgaagtgacctgcgtggtggtggatgtgtctcacgaggaccccgaagtgaagttcaattggtacgtggacggcgtggaagtgcacaacgccaagaccaagcctagagaggaacagtacaacagcacctacagagtggtgtccgtgctgacagtgctgcaccaggattggctgaacggcaaagagtacaagtgcaaggtgtccaacaaggccctgcctgctcctatcgagaaaaccatcagcaaggccaagggccagcctagggaaccccaggtttacaccctgcctccatgccgcgacgaactgaccaagaaccaggtgtccctgtggtgcctggtcaagggcttctacccttccgatatcgccgtggaatgggagagcaatggccagcctgagaacaactacaagacaacccctcctgtgctggacagcgacggctcattcttcctgtacagcaagctgacagtggacaagagcagatggcagcagggcaacgtgttcagctgcagcgtgctgcatgaagccctgcacagccactacacccagaagtccctgtctctgagccccggcaagtgataa

SEQ ID NO: 742 - RNA, 1638 nt, synthetic construct
  source 1..1638: mol_type = other RNA
atggattggatctggcgcatcctgtttctcgtgggagctgccacaggcgcccactctgattttgtgctgacacagtctccccacagcctgagcgttacacctggcgagtctgccagcatcagctgcaagtctagccactctctgatccacggcgaccggaacaactacctggcttggtacgtgcagaagcccggcagatctcctcagctgctgatctacctggccagcagcagagcttctggcgtgcccgatagattttctggcagcggcagcgacaaggacttcaccctgaagatctccagagtggaaaccgaggacgtgggcacctactactgtatgcagggcagagagagcccctggacatttggccagggcaccaaggtggacatcaaaggcggcggaggaagcggaggcggaggttctggtggcggaggctcaggcggtggcggatctcaagttcatctgacacagagcggccctgaagtgcggaagcctggcacaagcgtgaaggtgtcctgtaaagcccctggcaacaccctgaaaacctacgacctgcactgggtccgatctgtgcctggacagggactgcaatggatgggctggattagccacgagggcgacaagaaagtgatcgtggaacggttcaaggccaaagtgaccatcgactgggacagaagcaccaacaccgcctacctgcagctgagcggactgacatctggcgataccgccgtgtactactgtgccaagggcagcaagcaccggctgagagattacgccctgtacgacgatgacggcgccctgaattgggccgtcgatgtggactacctgagcaacctggaattctggggccagggaacagccgtgacagtgtcttccggcggaggtggaagtggtggtggcggtagcggaggcggtgggtccggaggtggtggatctgaacctaagagcagcgacaagacccacacctgtcctccatgtcctgctccagaactgctggccggaccttccgtgttcctgtttcctccaaagcctaaggacaccctgatgatcagcagaacccctgaagtgacctgcgtggtggtggatgtgtctcacgaggaccccgaagtgaagttcaattggtacgtggacggcgtggaagtgcacaatgccaagaccaagcctagagaggaacagtacaacagcacctacagagtggtgtccgtgctgaccgtgctgcaccaggattggctgaacggcaaagagtacaagtgcaaggtgtccaacaaggccctgcctctgcctgaggaaaagaccatcagcaaggccaagggccagcctagggaaccccaggtttacaccctgcctccatgccgcgacgaactgaccaagaaccaggtgtccctgtggtgcctggtcaagggcttctacccttccgatatcgccgtggaatgggagagcaatggccagcctgagaacaactacaagacaacccctcctgtgctggacagcgacggctcattcttcctgtacagcaagctgacagtggacaagagcagatggcagcagggcaacgtgttcagctgcagcgtgctgcatgaagccctgcacagccactacacccagaagtccctgtctctgagccccggcaagtgataa

SEQ ID NO: 743 - RNA, 1638 nt, synthetic construct
  source 1..1638: mol_type = other RNA
atggattggatctggcgcatcctgtttctcgtgggagctgccacaggcgcccactctgattttgtgctgacacagtctccccacagcctgagcgttacacctggcgagtctgccagcatcagctgcaagtctagccactctctgatccacggcgaccggaacaactacctggcttggtacgtgcagaagcccggcagatctcctcagctgctgatctacctggccagcagcagagcttctggcgtgcccgatagattttctggcagcggcagcgacaaggacttcaccctgaagatctccagagtggaaaccgaggacgtgggcacctactactgtatgcagggcagagagagcccctggacatttggccagggcaccaaggtggacatcaaaggcggcggaggaagcggaggcggaggttctggtggcggaggctcaggcggtggcggatctcaagttcatctgacacagagcggccctgaagtgcggaagcctggcacaagcgtgaaggtgtcctgtaaagcccctggcaacaccctgaaaacctacgacctgcactgggtccgatctgtgcctggacagggactgcaatggatgggctggattagccacgagggcgacaagaaagtgatcgtggaacggttcaaggccaaagtgaccatcgactgggacagaagcaccaacaccgcctacctgcagctgagcggactgacatctggcgataccgccgtgtactactgtgccaagggcagcaagcaccggctgagagattacgccctgtacgacgatgacggcgccctgaattgggccgtcgatgtggactacctgagcaacctggaattctggggccagggaacagccgtgacagtgtcttccggcggaggtggaagtggtggtggcggtagcggaggcggtgggtccggaggtggtggatctgaacctaagagcagcgacaagacccacacctgtcctccatgtcctgctccagaactgctggccggaccttccgtgttcctgtttcctccaaagcctaaggacaccctgatgatcagcagaacccctgaagtgacctgcgtggtggtggatgtgtctcacgaggaccctgaagtgaagttcaattggtacgtggacggcgtggaagtgcacaacgccaagaccaagcctagagaggaacagtacaacagcacctacagagtggtgtccgtgctgaccgtgctgcaccaggattggctgaacggcaaagagtacaagtgcaaggtgtccaacaaggccctgcctgcccctgaggaaaagaccatcagcaaggccaagggccagcctagggaaccccaggtttacaccctgcctccatgccgcgacgaactgaccaagaaccaggtgtccctgtggtgcctggtcaagggcttctacccttccgatatcgccgtggaatgggagagcaatggccagcctgagaacaactacaagacaacccctcctgtgctggacagcgacggctcattcttcctgtacagcaagctgacagtggacaagagcagatggcagcagggcaacgtgttcagctgcagcgtgctgcatgaagccctgcacagccactacacccagaagtccctgtctctgagccccggcaagtgataa

SEQ ID NO: 744 - RNA, 1638 nt, synthetic construct
  source 1..1638: mol_type = other RNA
atggattggatctggcgcatcctgtttctcgtgggagctgccacaggcgcccactctgattttgtgctgacacagtctccccacagcctgagcgttacacctggcgagtctgccagcatcagctgcaagtctagccactctctgatccacggcgaccggaacaactacctggcttggtacgtgcagaagcccggcagatctcctcagctgctgatctacctggccagcagcagagcttctggcgtgcccgatagattttctggcagcggcagcgacaaggacttcaccctgaagatctccagagtggaaaccgaggacgtgggcacctactactgtatgcagggcagagagagcccctggacatttggccagggcaccaaggtggacatcaaaggcggcggaggaagcggaggcggaggttctggtggcggaggctcaggcggtggcggatctcaagttcatctgacacagagcggccctgaagtgcggaagcctggcacaagcgtgaaggtgtcctgtaaagcccctggcaacaccctgaaaacctacgacctgcactgggtccgatctgtgcctggacagggactgcaatggatgggctggattagccacgagggcgacaagaaagtgatcgtggaacggttcaaggccaaagtgaccatcgactgggacagaagcaccaacaccgcctacctgcagctgagcggactgacatctggcgataccgccgtgtactactgtgccaagggcagcaagcaccggctgagagattacgccctgtacgacgatgacggcgccctgaattgggccgtcgatgtggactacctgagcaacctggaattctggggccagggaacagccgtgacagtgtcttccggcggaggtggaagtggtggtggcggtagcggaggcggtgggtccggaggtggtggatctgaacctaagagcagcgacaagacccacacctgtcctccatgtcctgctccagaactgctggccggaccttccgtgttcctgtttcctccaaagcctaaggacaccctgatgatcagcagaacccctgaagtgacctgcgtggtggtggatgtgtctcacgaggaccctgaagtgaagttcaattggtacgtggacggcgtggaagtgcacaacgccaagaccaagcctagagaggaacagtacaacagcacctacagagtggtgtccgtgctgaccgtgctgcaccaggattggctgaacggcaaagagtacaagtgcaaggtgtccaacaaggccctgcctgcccctatcgaaaagaccatcagcaaggccaagggccagcctagggaaccccaggtttacaccctgcctccatgccgcgacgaactgaccaagaaccaggtgtccctgtggtgcctggtcaagggcttctacccttccgatatcgccgtggaatgggagagcaatggccagcctgagaacaactacaagacaacccctcctgtgctggacagcgacggctcattcttcctgtacagcaagctgacagtggacaagagcagatggcagcagggcaacgtgttcagctgcagcgtgctgcatgaagccctgcacagccactacacccagaagtccctgtctctgagccccggcaagtgataa

SEQ ID NO: 745 - RNA, 1638 nt, synthetic construct
  source 1..1638: mol_type = other RNA
atggattggatctggcgcatcctgtttctcgtgggagctgccacaggcgcccactctgattttgtgctgacacagtctccccacagcctgagcgttacacctggcgagtctgccagcatcagctgcaagtctagccactctctgatccacggcgaccggaacaactacctggcttggtacgtgcagaagcccggcagatctcctcagctgctgatctacctggccagcagcagagcttctggcgtgcccgatagattttctggcagcggcagcgacaaggacttcaccctgaagatctccagagtggaaaccgaggacgtgggcacctactactgtatgcagggcagagagagcccctggacatttggccagggcaccaaggtggacatcaaaggcggcggaggaagcggaggcggaggttctggtggcggaggctcaggcggtggcggatctcaagttcatctgacacagagcggccctgaagtgcggaagcctggcacaagcgtgaaggtgtcctgtaaagcccctggcaacaccctgaaaacctacgacctgcactgggtccgatctgtgcctggacagggactgcaatggatgggctggattagccacgagggcgacaagaaagtgatcgtggaacggttcaaggccaaagtgaccatcgactgggacagaagcaccaacaccgcctacctgcagctgagcggactgacatctggcgataccgccgtgtactactgtgccaagggcagcaagcaccggctgagagattacgccctgtacgacgatgacggcgccctgaattgggccgtcgatgtggactacctgagcaacctggaattctggggccagggaacagccgtgacagtgtcttccggcggaggtggaagtggtggtggcggtagcggaggcggtgggtccggaggtggtggatctgaacctaagagcagcgacaagacccacacctgtcctccatgtcctgctccagaactgctgggcggaccttccgtgttcctgtttcctccaaagcctaaggacaccctgatgatcagcagaacccctgaagtgacctgcgtggtggtggatgtgtctcacgaggaccctgaagtgaagttcaattggtacgtggacggcgtggaagtgcacaacgccaagaccaagcctagagaggaacagtacaacagcacctacagagtggtgtccgtgctgaccgtgctgcaccaggattggctgaacggcaaagagtacaagtgcaaggtgtccaacaaggccctgcctgcccctgaggaaaagaccatcagcaaggccaagggccagcctagggaaccccaggtttacaccctgcctccatgccgcgacgaactgaccaagaaccaggtgtccctgtggtgcctggtcaagggcttctacccttccgatatcgccgtggaatgggagagcaatggccagcctgagaacaactacaagacaacccctcctgtgctggacagcgacggctcattcttcctgtacagcaagctgacagtggacaagagcagatggcagcagggcaacgtgttcagctgcagcgtgctgcatgaagccctgcacagccactacacccagaagtccctgtctctgagccccggcaagtgataa

SEQ ID NO: 746 - RNA, 1653 nt, synthetic construct
  source 1..1653: mol_type = other RNA
atggattggatctggcgcatcctgtttctcgtgggagctgccacaggcgcccactctcaagttcacctgacacagtctggccccgaagtgcggaagcctggcacaagcgtgaaggtgtcctgtaaagcccctggcaacaccctgaaaacctacgacctgcactgggtccgatctgtgcctggacaaggactgcagtggatgggctggattagccacgagggcgacaagaaagtgatcgtggaacggttcaaggccaaagtgaccatcgactgggacagaagcaccaacaccgcctacctgcagctgagcggactgacatctggcgataccgccgtgtactactgtgccaagggcagcaagcaccggctgagagattacgccctgtacgacgatgacggcgccctgaattgggccgtcgatgtggactacctgagcaacctggaattctggggccagggaacagccgtgacagtgtcttccggcggcggaggaagcggagggggaggctctggaggtggtggctctggtggcggaggctcaggcggtggcggatctgattttgtgctgacacagagccctcacagcctgagcgttacacctggcgagagcgccagcatcagctgcaagtctagccactctctgatccacggcgaccggaacaactacctggcttggtacgtgcagaagcccggcagatctcctcagctgctgatctacctggccagcagcagagctagcggcgtgccagatagattttctggcagcggcagcgacaaggatttcaccctgaagatctccagagtggaaaccgaggacgtgggcacctactactgtatgcagggcagagagagcccctggacatttggccagggcaccaaggtggacatcaaaggcggaggtggaagtggtggtggcggtagcggaggcggtgggtccggaggtggtggatctgaacctaagagcagcgacaagacccacacctgtcctccatgtcctgctccagaactgctcggcggaccttccgtgttcctgtttcctccaaagcctaaggacaccctgatgatcagcagaacccctgaagtgacctgcgtggtggtggatgtgtctcacgaggaccccgaagtgaagttcaattggtacgtggacggcgtggaagtgcacaacgccaagaccaagcctagagaggaacagtacaacagcacctacagagtggtgtccgtgctgacagtgctgcaccaggattggctgaacggcaaagagtacaagtgcaaggtgtccaacaaggccctgcctgctcctatcgagaaaaccatcagcaaggccaagggccagcctagggaaccccaggtttacacactgcctccaagccgcgaggaaatgaccaagaaccaggtgtccctgacctgcctcgtgaagggcttctacccttccgatatcgccgtggaatgggagagcaatggccagcctgagaacaactacaagacaacccctcctgtgctggacagcgacggctcattcttcctgtacagcaagctgactgtggataagtcccggtggcagcagggcaacgtgttcagctgttctgtgatgcacgaagccctgcacaaccactacacccagaaaagcctgtctctgagccccggcaagtgataa

SEQ ID NO: 747 - RNA, 1653 nt, synthetic construct
  source 1..1653: mol_type = other RNA
atggattggatctggcgcatcctgtttctcgtgggagctgccacaggcgcccactctcaagttcacctgacacagtctggccccgaagtgcggaagcctggcacaagcgtgaaggtgtcctgtaaagcccctggcaacaccctgaaaacctacgacctgcactgggtccgatctgtgcctggacaaggactgcagtggatgggctggattagccacgagggcgacaagaaagtgatcgtggaacggttcaaggccaaagtgaccatcgactgggacagaagcaccaacaccgcctacctgcagctgagcggactgacatctggcgataccgccgtgtactactgtgccaagggcagcaagcaccggctgagagattacgccctgtacgacgatgacggcgccctgaattgggccgtcgatgtggactacctgagcaacctggaattctggggccagggaacagccgtgacagtgtcttccggcggcggaggaagcggagggggaggctctggaggtggtggctctggtggcggaggctcaggcggtggcggatctgattttgtgctgacacagagccctcacagcctgagcgttacacctggcgagagcgccagcatcagctgcaagtctagccactctctgatccacggcgaccggaacaactacctggcttggtacgtgcagaagcccggcagatctcctcagctgctgatctacctggccagcagcagagctagcggcgtgccagatagattttctggcagcggcagcgacaaggatttcaccctgaagatctccagagtggaaaccgaggacgtgggcacctactactgtatgcagggcagagagagcccctggacatttggccagggcaccaaggtggacatcaaaggcggaggtggaagtggtggtggcggtagcggaggcggtgggtccggaggtggtggatctgaacctaagagcagcgacaagacccacacctgtcctccatgtcctgctccagaactgctcggcggaccttccgtgttcctgtttcctccaaagcctaaggacaccctgatgatcagcagaacccctgaagtgacctgcgtggtggtggatgtgtctcacgaggaccccgaagtgaagttcaattggtacgtggacggcgtggaagtgcacaacgccaagaccaagcctagagaggaacagtacaacagcacctacagagtggtgtccgtgctgacagtgctgcaccaggattggctgaacggcaaagagtacaagtgcaaggtgtccaacaaggccctgcctgctcctatcgagaaaaccatcagcaaggccaagggccagcctagggaaccccaggtttacacactgcctccaagccgcgaggaaatgaccaagaaccaggtgtccctgacctgcctcgtgaagggcttctacccttccgatatcgccgtggaatgggagagcaatggccagcctgagaacaactacaagacaacccctcctgtgctggacagcgacggctcattcttcctgtacagcaagctgaccgtggacaagtccagatggcagcagggcaacgtgttcagctgtagcgtgctgcacgaagccctgcacagccactacacccagaaaagcctgtctctgagccccggcaaatgataa

SEQ ID NO: 748 - RNA, 1653 nt, synthetic construct
  source 1..1653: mol_type = other RNA
atggattggatctggcgcatcctgtttctcgtgggagctgccacaggcgcccactctcaagttcacctgacacagtctggccccgaagtgcggaagcctggcacaagcgtgaaggtgtcctgtaaagcccctggcaacaccctgaaaacctacgacctgcactgggtccgatctgtgcctggacaaggactgcagtggatgggctggattagccacgagggcgacaagaaagtgatcgtggaacggttcaaggccaaagtgaccatcgactgggacagaagcaccaacaccgcctacctgcagctgagcggactgacatctggcgataccgccgtgtactactgtgccaagggcagcaagcaccggctgagagattacgccctgtacgacgatgacggcgccctgaattgggccgtcgatgtggactacctgagcaacctggaattctggggccagggaacagccgtgacagtgtcttccggcggcggaggaagcggagggggaggctctggaggtggtggctctggtggcggaggctcaggcggtggcggatctgattttgtgctgacacagagccctcacagcctgagcgttacacctggcgagagcgccagcatcagctgcaagtctagccactctctgatccacggcgaccggaacaactacctggcttggtacgtgcagaagcccggcagatctcctcagctgctgatctacctggccagcagcagagctagcggcgtgccagatagattttctggcagcggcagcgacaaggatttcaccctgaagatctccagagtggaaaccgaggacgtgggcacctactactgtatgcagggcagagagagcccctggacatttggccagggcaccaaggtggacatcaaaggcggaggtggaagtggtggtggcggtagcggaggcggtgggtccggaggtggtggatctgaacctaagagcagcgacaagacccacacctgtcctccatgtcctgctccagaactgctggccggaccttccgtgttcctgtttcctccaaagcctaaggacaccctgatgatcagcagaacccctgaagtgacctgcgtggtggtggatgtgtctcacgaggaccccgaagtgaagttcaattggtacgtggacggcgtggaagtgcacaatgccaagaccaagcctagagaggaacagtacaacagcacctacagagtggtgtccgtgctgaccgtgctgcaccaggattggctgaacggcaaagagtacaagtgcaaggtgtccaacaaggccctgcctctgcctgaggaaaagaccatcagcaaggccaagggccagcctagggaaccccaggtttacacactgcctccaagccgcgaggaaatgaccaagaaccaggtgtccctgacctgcctcgtgaagggcttctacccttccgatatcgccgtggaatgggagagcaatggccagcctgagaacaactacaagacaacccctcctgtgctggacagcgacggctcattcttcctgtacagcaagctgaccgtggacaagtccagatggcagcagggcaacgtgttcagctgtagcgtgctgcacgaagccctgcacagccactacacccagaaaagcctgtctctgagccccggcaaatgataa

SEQ ID NO: 749 - RNA, 1653 nt, synthetic construct
  source 1..1653: mol_type = other RNA
atggattggatctggcgcatcctgtttctcgtgggagctgccacaggcgcccactctcaagttcacctgacacagtctggccccgaagtgcggaagcctggcacaagcgtgaaggtgtcctgtaaagcccctggcaacaccctgaaaacctacgacctgcactgggtccgatctgtgcctggacaaggactgcagtggatgggctggattagccacgagggcgacaagaaagtgatcgtggaacggttcaaggccaaagtgaccatcgactgggacagaagcaccaacaccgcctacctgcagctgagcggactgacatctggcgataccgccgtgtactactgtgccaagggcagcaagcaccggctgagagattacgccctgtacgacgatgacggcgccctgaattgggccgtcgatgtggactacctgagcaacctggaattctggggccagggaacagccgtgacagtgtcttccggcggcggaggaagcggagggggaggctctggaggtggtggctctggtggcggaggctcaggcggtggcggatctgattttgtgctgacacagagccctcacagcctgagcgttacacctggcgagagcgccagcatcagctgcaagtctagccactctctgatccacggcgaccggaacaactacctggcttggtacgtgcagaagcccggcagatctcctcagctgctgatctacctggccagcagcagagctagcggcgtgccagatagattttctggcagcggcagcgacaaggatttcaccctgaagatctccagagtggaaaccgaggacgtgggcacctactactgtatgcagggcagagagagcccctggacatttggccagggcaccaaggtggacatcaaaggcggaggtggaagtggtggtggcggtagcggaggcggtgggtccggaggtggtggatctgaacctaagagcagcgacaagacccacacctgtcctccatgtcctgctccagaactgctggccggaccttccgtgttcctgtttcctccaaagcctaaggacaccctgatgatcagcagaacccctgaagtgacctgcgtggtggtggatgtgtctcacgaggaccctgaagtgaagttcaattggtacgtggacggcgtggaagtgcacaacgccaagaccaagcctagagaggaacagtacaacagcacctacagagtggtgtccgtgctgaccgtgctgcaccaggattggctgaacggcaaagagtacaagtgcaaggtgtccaacaaggccctgcctgcccctgaggaaaagaccatcagcaaggccaagggccagcctagggaaccccaggtttacacactgcctccaagccgcgaggaaatgaccaagaaccaggtgtccctgacctgcctcgtgaagggcttctacccttccgatatcgccgtggaatgggagagcaatggccagcctgagaacaactacaagacaacccctcctgtgctggacagcgacggctcattcttcctgtacagcaagctgaccgtggacaagtccagatggcagcagggcaacgtgttcagctgtagcgtgctgcacgaagccctgcacagccactacacccagaaaagcctgtctctgagccccggcaaatgataa

SEQ ID NO: 750 - RNA, 1653 nt, synthetic construct
  source 1..1653: mol_type = other RNA
atggattggatctggcgcatcctgtttctcgtgggagctgccacaggcgcccactctcaagttcacctgacacagtctggccccgaagtgcggaagcctggcacaagcgtgaaggtgtcctgtaaagcccctggcaacaccctgaaaacctacgacctgcactgggtccgatctgtgcctggacaaggactgcagtggatgggctggattagccacgagggcgacaagaaagtgatcgtggaacggttcaaggccaaagtgaccatcgactgggacagaagcaccaacaccgcctacctgcagctgagcggactgacatctggcgataccgccgtgtactactgtgccaagggcagcaagcaccggctgagagattacgccctgtacgacgatgacggcgccctgaattgggccgtcgatgtggactacctgagcaacctggaattctggggccagggaacagccgtgacagtgtcttccggcggcggaggaagcggagggggaggctctggaggtggtggctctggtggcggaggctcaggcggtggcggatctgattttgtgctgacacagagccctcacagcctgagcgttacacctggcgagagcgccagcatcagctgcaagtctagccactctctgatccacggcgaccggaacaactacctggcttggtacgtgcagaagcccggcagatctcctcagctgctgatctacctggccagcagcagagctagcggcgtgccagatagattttctggcagcggcagcgacaaggatttcaccctgaagatctccagagtggaaaccgaggacgtgggcacctactactgtatgcagggcagagagagcccctggacatttggccagggcaccaaggtggacatcaaaggcggaggtggaagtggtggtggcggtagcggaggcggtgggtccggaggtggtggatctgaacctaagagcagcgacaagacccacacctgtcctccatgtcctgctccagaactgctggccggaccttccgtgttcctgtttcctccaaagcctaaggacaccctgatgatcagcagaacccctgaagtgacctgcgtggtggtggatgtgtctcacgaggaccctgaagtgaagttcaattggtacgtggacggcgtggaagtgcacaacgccaagaccaagcctagagaggaacagtacaacagcacctacagagtggtgtccgtgctgaccgtgctgcaccaggattggctgaacggcaaagagtacaagtgcaaggtgtccaacaaggccctgcctgcccctatcgaaaagaccatcagcaaggccaagggccagcctagggaaccccaggtttacacactgcctccaagccgcgaggaaatgaccaagaaccaggtgtccctgacctgcctcgtgaagggcttctacccttccgatatcgccgtggaatgggagagcaatggccagcctgagaacaactacaagacaacccctcctgtgctggacagcgacggctcattcttcctgtacagcaagctgaccgtggacaagtccagatggcagcagggcaacgtgttcagctgtagcgtgctgcacgaagccctgcacagccactacacccagaaaagcctgtctctgagccccggcaaatgataa

SEQ ID NO: 751 - RNA, 1653 nt, synthetic construct
  source 1..1653: mol_type = other RNA
atggattggatctggcgcatcctgtttctcgtgggagctgccacaggcgcccactctcaagttcacctgacacagtctggccccgaagtgcggaagcctggcacaagcgtgaaggtgtcctgtaaagcccctggcaacaccctgaaaacctacgacctgcactgggtccgatctgtgcctggacaaggactgcagtggatgggctggattagccacgagggcgacaagaaagtgatcgtggaacggttcaaggccaaagtgaccatcgactgggacagaagcaccaacaccgcctacctgcagctgagcggactgacatctggcgataccgccgtgtactactgtgccaagggcagcaagcaccggctgagagattacgccctgtacgacgatgacggcgccctgaattgggccgtcgatgtggactacctgagcaacctggaattctggggccagggaacagccgtgacagtgtcttccggcggcggaggaagcggagggggaggctctggaggtggtggctctggtggcggaggctcaggcggtggcggatctgattttgtgctgacacagagccctcacagcctgagcgttacacctggcgagagcgccagcatcagctgcaagtctagccactctctgatccacggcgaccggaacaactacctggcttggtacgtgcagaagcccggcagatctcctcagctgctgatctacctggccagcagcagagctagcggcgtgccagatagattttctggcagcggcagcgacaaggatttcaccctgaagatctccagagtggaaaccgaggacgtgggcacctactactgtatgcagggcagagagagcccctggacatttggccagggcaccaaggtggacatcaaaggcggaggtggaagtggtggtggcggtagcggaggcggtgggtccggaggtggtggatctgaacctaagagcagcgacaagacccacacctgtcctccatgtcctgctccagaactgctgggcggaccttccgtgttcctgtttcctccaaagcctaaggacaccctgatgatcagcagaacccctgaagtgacctgcgtggtggtggatgtgtctcacgaggaccctgaagtgaagttcaattggtacgtggacggcgtggaagtgcacaacgccaagaccaagcctagagaggaacagtacaacagcacctacagagtggtgtccgtgctgaccgtgctgcaccaggattggctgaacggcaaagagtacaagtgcaaggtgtccaacaaggccctgcctgcccctgaggaaaagaccatcagcaaggccaagggccagcctagggaaccccaggtttacacactgcctccaagccgcgaggaaatgaccaagaaccaggtgtccctgacctgcctcgtgaagggcttctacccttccgatatcgccgtggaatgggagagcaatggccagcctgagaacaactacaagacaacccctcctgtgctggacagcgacggctcattcttcctgtacagcaagctgaccgtggacaagtccagatggcagcagggcaacgtgttcagctgtagcgtgctgcacgaagccctgcacagccactacacccagaaaagcctgtctctgagccccggcaaatgataa

SEQ ID NO: 752 - RNA, 1653 nt, synthetic construct
  source 1..1653: mol_type = other RNA
atggattggatctggcgcatcctgtttctcgtgggagctgccacaggcgcccactctcaagttcacctgacacagtctggccccgaagtgcggaagcctggcacaagcgtgaaggtgtcctgtaaagcccctggcaacaccctgaaaacctacgacctgcactgggtccgatctgtgcctggacaaggactgcagtggatgggctggattagccacgagggcgacaagaaagtgatcgtggaacggttcaaggccaaagtgaccatcgactgggacagaagcaccaacaccgcctacctgcagctgagcggactgacatctggcgataccgccgtgtactactgtgccaagggcagcaagcaccggctgagagattacgccctgtacgacgatgacggcgccctgaattgggccgtcgatgtggactacctgagcaacctggaattctggggccagggaacagccgtgacagtgtcttccggcggcggaggaagcggagggggaggctctggaggtggtggctctggtggcggaggctcaggcggtggcggatctgattttgtgctgacacagagccctcacagcctgagcgttacacctggcgagagcgccagcatcagctgcaagtctagccactctctgatccacggcgaccggaacaactacctggcttggtacgtgcagaagcccggcagatctcctcagctgctgatctacctggccagcagcagagctagcggcgtgccagatagattttctggcagcggcagcgacaaggatttcaccctgaagatctccagagtggaaaccgaggacgtgggcacctactactgtatgcagggcagagagagcccctggacatttggccagggcaccaaggtggacatcaaaggcggaggtggaagtggtggtggcggtagcggaggcggtgggtccggaggtggtggatctgaacctaagagcagcgacaagacccacacctgtcctccatgtcctgctccagaactgctcggcggaccttccgtgttcctgtttcctccaaagcctaaggacaccctgatgatcagcagaacccctgaagtgacctgcgtggtggtggatgtgtctcacgaggaccccgaagtgaagttcaattggtacgtggacggcgtggaagtgcacaacgccaagaccaagcctagagaggaacagtacaacagcacctacagagtggtgtccgtgctgacagtgctgcaccaggattggctgaacggcaaagagtacaagtgcaaggtgtccaacaaggccctgcctgctcctatcgagaaaaccatcagcaaggccaagggccagcctagggaaccccaagtctgtacactgcctcctagccgcgaggaaatgaccaagaaccaggtgtccctgagctgcgccgtgaagggcttttacccttccgatatcgccgtggaatgggagagcaatggccagcctgagaacaactacaagacaacccctcctgtgctggacagcgacggctcattcttcctggtgtccaagctgacagtggacaagagcagatggcagcagggcaacgtgttcagctgctctgtgctgcacgaagccctgcacagccactacacccagaagtccctgtctctgagccccggcaagtgataa

SEQ ID NO: 753 - RNA, 1653 nt, synthetic construct
  source 1..1653: mol_type = other RNA
atggattggatctggcgcatcctgtttctcgtgggagctgccacaggcgcccactctcaagttcacctgacacagtctggccccgaagtgcggaagcctggcacaagcgtgaaggtgtcctgtaaagcccctggcaacaccctgaaaacctacgacctgcactgggtccgatctgtgcctggacaaggactgcagtggatgggctggattagccacgagggcgacaagaaagtgatcgtggaacggttcaaggccaaagtgaccatcgactgggacagaagcaccaacaccgcctacctgcagctgagcggactgacatctggcgataccgccgtgtactactgtgccaagggcagcaagcaccggctgagagattacgccctgtacgacgatgacggcgccctgaattgggccgtcgatgtggactacctgagcaacctggaattctggggccagggaacagccgtgacagtgtcttccggcggcggaggaagcggagggggaggctctggaggtggtggctctggtggcggaggctcaggcggtggcggatctgattttgtgctgacacagagccctcacagcctgagcgttacacctggcgagagcgccagcatcagctgcaagtctagccactctctgatccacggcgaccggaacaactacctggcttggtacgtgcagaagcccggcagatctcctcagctgctgatctacctggccagcagcagagctagcggcgtgccagatagattttctggcagcggcagcgacaaggatttcaccctgaagatctccagagtggaaaccgaggacgtgggcacctactactgtatgcagggcagagagagcccctggacatttggccagggcaccaaggtggacatcaaaggcggaggtggaagtggtggtggcggtagcggaggcggtgggtccggaggtggtggatctgaacctaagagcagcgacaagacccacacctgtcctccatgtcctgctccagaactgctggccggaccttccgtgttcctgtttcctccaaagcctaaggacaccctgatgatcagcagaacccctgaagtgacctgcgtggtggtggatgtgtctcacgaggaccccgaagtgaagttcaattggtacgtggacggcgtggaagtgcacaatgccaagaccaagcctagagaggaacagtacaacagcacctacagagtggtgtccgtgctgaccgtgctgcaccaggattggctgaacggcaaagagtacaagtgcaaggtgtccaacaaggccctgcctctgcctgaggaaaagaccatcagcaaggccaagggccagcctagggaaccccaagtctgtacactgcctcctagccgcgaggaaatgaccaagaaccaggtgtccctgagctgcgccgtgaagggcttttacccttccgatatcgccgtggaatgggagagcaatggccagcctgagaacaactacaagacaacccctcctgtgctggacagcgacggctcattcttcctggtgtccaagctgacagtggacaagagcagatggcagcagggcaacgtgttcagctgctctgtgctgcacgaagccctgcacagccactacacccagaagtccctgtctctgagccccggcaagtgataa

SEQ ID NO: 754 - RNA, 1653 nt, synthetic construct
  source 1..1653: mol_type = other RNA
atggattggatctggcgcatcctgtttctcgtgggagctgccacaggcgcccactctcaagttcacctgacacagtctggccccgaagtgcggaagcctggcacaagcgtgaaggtgtcctgtaaagcccctggcaacaccctgaaaacctacgacctgcactgggtccgatctgtgcctggacaaggactgcagtggatgggctggattagccacgagggcgacaagaaagtgatcgtggaacggttcaaggccaaagtgaccatcgactgggacagaagcaccaacaccgcctacctgcagctgagcggactgacatctggcgataccgccgtgtactactgtgccaagggcagcaagcaccggctgagagattacgccctgtacgacgatgacggcgccctgaattgggccgtcgatgtggactacctgagcaacctggaattctggggccagggaacagccgtgacagtgtcttccggcggcggaggaagcggagggggaggctctggaggtggtggctctggtggcggaggctcaggcggtggcggatctgattttgtgctgacacagagccctcacagcctgagcgttacacctggcgagagcgccagcatcagctgcaagtctagccactctctgatccacggcgaccggaacaactacctggcttggtacgtgcagaagcccggcagatctcctcagctgctgatctacctggccagcagcagagctagcggcgtgccagatagattttctggcagcggcagcgacaaggatttcaccctgaagatctccagagtggaaaccgaggacgtgggcacctactactgtatgcagggcagagagagcccctggacatttggccagggcaccaaggtggacatcaaaggcggaggtggaagtggtggtggcggtagcggaggcggtgggtccggaggtggtggatctgaacctaagagcagcgacaagacccacacctgtcctccatgtcctgctccagaactgctggccggaccttccgtgttcctgtttcctccaaagcctaaggacaccctgatgatcagcagaacccctgaagtgacctgcgtggtggtggatgtgtctcacgaggaccctgaagtgaagttcaattggtacgtggacggcgtggaagtgcacaacgccaagaccaagcctagagaggaacagtacaacagcacctacagagtggtgtccgtgctgaccgtgctgcaccaggattggctgaacggcaaagagtacaagtgcaaggtgtccaacaaggccctgcctgcccctgaggaaaagaccatcagcaaggccaagggccagcctagggaaccccaagtctgtacactgcctcctagccgcgaggaaatgaccaagaaccaggtgtccctgagctgcgccgtgaagggcttttacccttccgatatcgccgtggaatgggagagcaatggccagcctgagaacaactacaagacaacccctcctgtgctggacagcgacggctcattcttcctggtgtccaagctgacagtggacaagagcagatggcagcagggcaacgtgttcagctgctctgtgctgcacgaagccctgcacagccactacacccagaagtccctgtctctgagccccggcaagtgataa

SEQ ID NO: 755 - RNA, 1653 nt, synthetic construct
  source 1..1653: mol_type = other RNA
atggattggatctggcgcatcctgtttctcgtgggagctgccacaggcgcccactctcaagttcacctgacacagtctggccccgaagtgcggaagcctggcacaagcgtgaaggtgtcctgtaaagcccctggcaacaccctgaaaacctacgacctgcactgggtccgatctgtgcctggacaaggactgcagtggatgggctggattagccacgagggcgacaagaaagtgatcgtggaacggttcaaggccaaagtgaccatcgactgggacagaagcaccaacaccgcctacctgcagctgagcggactgacatctggcgataccgccgtgtactactgtgccaagggcagcaagcaccggctgagagattacgccctgtacgacgatgacggcgccctgaattgggccgtcgatgtggactacctgagcaacctggaattctggggccagggaacagccgtgacagtgtcttccggcggcggaggaagcggagggggaggctctggaggtggtggctctggtggcggaggctcaggcggtggcggatctgattttgtgctgacacagagccctcacagcctgagcgttacacctggcgagagcgccagcatcagctgcaagtctagccactctctgatccacggcgaccggaacaactacctggcttggtacgtgcagaagcccggcagatctcctcagctgctgatctacctggccagcagcagagctagcggcgtgccagatagattttctggcagcggcagcgacaaggatttcaccctgaagatctccagagtggaaaccgaggacgtgggcacctactactgtatgcagggcagagagagcccctggacatttggccagggcaccaaggtggacatcaaaggcggaggtggaagtggtggtggcggtagcggaggcggtgggtccggaggtggtggatctgaacctaagagcagcgacaagacccacacctgtcctccatgtcctgctccagaactgctggccggaccttccgtgttcctgtttcctccaaagcctaaggacaccctgatgatcagcagaacccctgaagtgacctgcgtggtggtggatgtgtctcacgaggaccctgaagtgaagttcaattggtacgtggacggcgtggaagtgcacaacgccaagaccaagcctagagaggaacagtacaacagcacctacagagtggtgtccgtgctgaccgtgctgcaccaggattggctgaacggcaaagagtacaagtgcaaggtgtccaacaaggccctgcctgcccctatcgaaaagaccatcagcaaggccaagggccagcctagggaaccccaagtctgtacactgcctcctagccgcgaggaaatgaccaagaaccaggtgtccctgagctgcgccgtgaagggcttttacccttccgatatcgccgtggaatgggagagcaatggccagcctgagaacaactacaagacaacccctcctgtgctggacagcgacggctcattcttcctggtgtccaagctgacagtggacaagagcagatggcagcagggcaacgtgttcagctgctctgtgctgcacgaagccctgcacagccactacacccagaagtccctgtctctgagccccggcaagtgataa

SEQ ID NO: 756 - RNA, 1653 nt, synthetic construct
  source 1..1653: mol_type = other RNA
atggattggatctggcgcatcctgtttctcgtgggagctgccacaggcgcccactctcaagttcacctgacacagtctggccccgaagtgcggaagcctggcacaagcgtgaaggtgtcctgtaaagcccctggcaacaccctgaaaacctacgacctgcactgggtccgatctgtgcctggacaaggactgcagtggatgggctggattagccacgagggcgacaagaaagtgatcgtggaacggttcaaggccaaagtgaccatcgactgggacagaagcaccaacaccgcctacctgcagctgagcggactgacatctggcgataccgccgtgtactactgtgccaagggcagcaagcaccggctgagagattacgccctgtacgacgatgacggcgccctgaattgggccgtcgatgtggactacctgagcaacctggaattctggggccagggaacagccgtgacagtgtcttccggcggcggaggaagcggagggggaggctctggaggtggtggctctggtggcggaggctcaggcggtggcggatctgattttgtgctgacacagagccctcacagcctgagcgttacacctggcgagagcgccagcatcagctgcaagtctagccactctctgatccacggcgaccggaacaactacctggcttggtacgtgcagaagcccggcagatctcctcagctgctgatctacctggccagcagcagagctagcggcgtgccagatagattttctggcagcggcagcgacaaggatttcaccctgaagatctccagagtggaaaccgaggacgtgggcacctactactgtatgcagggcagagagagcccctggacatttggccagggcaccaaggtggacatcaaaggcggaggtggaagtggtggtggcggtagcggaggcggtgggtccggaggtggtggatctgaacctaagagcagcgacaagacccacacctgtcctccatgtcctgctccagaactgctgggcggaccttccgtgttcctgtttcctccaaagcctaaggacaccctgatgatcagcagaacccctgaagtgacctgcgtggtggtggatgtgtctcacgaggaccctgaagtgaagttcaattggtacgtggacggcgtggaagtgcacaacgccaagaccaagcctagagaggaacagtacaacagcacctacagagtggtgtccgtgctgaccgtgctgcaccaggattggctgaacggcaaagagtacaagtgcaaggtgtccaacaaggccctgcctgcccctgaggaaaagaccatcagcaaggccaagggccagcctagggaaccccaagtctgtacactgcctcctagccgcgaggaaatgaccaagaaccaggtgtccctgagctgcgccgtgaagggcttttacccttccgatatcgccgtggaatgggagagcaatggccagcctgagaacaactacaagacaacccctcctgtgctggacagcgacggctcattcttcctggtgtccaagctgacagtggacaagagcagatggcagcagggcaacgtgttcagctgctctgtgctgcacgaagccctgcacagccactacacccagaagtccctgtctctgagccccggcaagtgataa

SEQ ID NO: 757 - RNA, 1653 nt, synthetic construct
  source 1..1653: mol_type = other RNA
atggattggatctggcgcatcctgtttctcgtgggagctgccacaggcgcccactctcaagttcacctgacacagtctggccccgaagtgcggaagcctggcacaagcgtgaaggtgtcctgtaaagcccctggcaacaccctgaaaacctacgacctgcactgggtccgatctgtgcctggacaaggactgcagtggatgggctggattagccacgagggcgacaagaaagtgatcgtggaacggttcaaggccaaagtgaccatcgactgggacagaagcaccaacaccgcctacctgcagctgagcggactgacatctggcgataccgccgtgtactactgtgccaagggcagcaagcaccggctgagagattacgccctgtacgacgatgacggcgccctgaattgggccgtcgatgtggactacctgagcaacctggaattctggggccagggaacagccgtgacagtgtcttccggcggcggaggaagcggagggggaggctctggaggtggtggctctggtggcggaggctcaggcggtggcggatctgattttgtgctgacacagagccctcacagcctgagcgttacacctggcgagagcgccagcatcagctgcaagtctagccactctctgatccacggcgaccggaacaactacctggcttggtacgtgcagaagcccggcagatctcctcagctgctgatctacctggccagcagcagagctagcggcgtgccagatagattttctggcagcggcagcgacaaggatttcaccctgaagatctccagagtggaaaccgaggacgtgggcacctactactgtatgcagggcagagagagcccctggacatttggccagggcaccaaggtggacatcaaaggcggaggtggaagtggtggtggcggtagcggaggcggtgggtccggaggtggtggatctgaacctaagagcagcgacaagacccacacctgtcctccatgtcctgctccagaactgctcggcggaccttccgtgttcctgtttcctccaaagcctaaggacaccctgatgatcagcagaacccctgaagtgacctgcgtggtggtggatgtgtctcacgaggaccccgaagtgaagttcaattggtacgtggacggcgtggaagtgcacaacgccaagaccaagcctagagaggaacagtacaacagcacctacagagtggtgtccgtgctgacagtgctgcaccaggattggctgaacggcaaagagtacaagtgcaaggtgtccaacaaggccctgcctgctcctatcgagaaaaccatcagcaaggccaagggccagcctagggaaccccaggtttacaccctgcctccatgccgcgaggaaatgaccaagaaccaggtgtccctgtggtgcctcgtgaagggcttctacccttccgatatcgccgtggaatgggagagcaatggccagcctgagaacaactacaagacaacccctcctgtgctggacagcgacggctcattcttcctgtacagcaagctgaccgtggacaagtccagatggcagcagggcaacgtgttcagctgtagcgtgctgcacgaagccctgcacagccactacacccagaagtccctgtctctgagccccggcaagtgataa

SEQ ID NO: 758 - RNA, 1653 nt, synthetic construct
  source 1..1653: mol_type = other RNA
atggattggatctggcgcatcctgtttctcgtgggagctgccacaggcgcccactctcaagttcacctgacacagtctggccccgaagtgcggaagcctggcacaagcgtgaaggtgtcctgtaaagcccctggcaacaccctgaaaacctacgacctgcactgggtccgatctgtgcctggacaaggactgcagtggatgggctggattagccacgagggcgacaagaaagtgatcgtggaacggttcaaggccaaagtgaccatcgactgggacagaagcaccaacaccgcctacctgcagctgagcggactgacatctggcgataccgccgtgtactactgtgccaagggcagcaagcaccggctgagagattacgccctgtacgacgatgacggcgccctgaattgggccgtcgatgtggactacctgagcaacctggaattctggggccagggaacagccgtgacagtgtcttccggcggcggaggaagcggagggggaggctctggaggtggtggctctggtggcggaggctcaggcggtggcggatctgattttgtgctgacacagagccctcacagcctgagcgttacacctggcgagagcgccagcatcagctgcaagtctagccactctctgatccacggcgaccggaacaactacctggcttggtacgtgcagaagcccggcagatctcctcagctgctgatctacctggccagcagcagagctagcggcgtgccagatagattttctggcagcggcagcgacaaggatttcaccctgaagatctccagagtggaaaccgaggacgtgggcacctactactgtatgcagggcagagagagcccctggacatttggccagggcaccaaggtggacatcaaaggcggaggtggaagtggtggtggcggtagcggaggcggtgggtccggaggtggtggatctgaacctaagagcagcgacaagacccacacctgtcctccatgtcctgctccagaactgctggccggaccttccgtgttcctgtttcctccaaagcctaaggacaccctgatgatcagcagaacccctgaagtgacctgcgtggtggtggatgtgtctcacgaggaccccgaagtgaagttcaattggtacgtggacggcgtggaagtgcacaatgccaagaccaagcctagagaggaacagtacaacagcacctacagagtggtgtccgtgctgaccgtgctgcaccaggattggctgaacggcaaagagtacaagtgcaaggtgtccaacaaggccctgcctctgcctgaggaaaagaccatcagcaaggccaagggccagcctagggaaccccaggtttacaccctgcctccatgccgcgaggaaatgaccaagaaccaggtgtccctgtggtgcctcgtgaagggcttctacccttccgatatcgccgtggaatgggagagcaatggccagcctgagaacaactacaagacaacccctcctgtgctggacagcgacggctcattcttcctgtacagcaagctgaccgtggacaagtccagatggcagcagggcaacgtgttcagctgtagcgtgctgcacgaagccctgcacagccactacacccagaagtccctgtctctgagccccggcaagtgataa

SEQ ID NO: 759 - RNA, 1653 nt, synthetic construct
  source 1..1653: mol_type = other RNA
atggattggatctggcgcatcctgtttctcgtgggagctgccacaggcgcccactctcaagttcacctgacacagtctggccccgaagtgcggaagcctggcacaagcgtgaaggtgtcctgtaaagcccctggcaacaccctgaaaacctacgacctgcactgggtccgatctgtgcctggacaaggactgcagtggatgggctggattagccacgagggcgacaagaaagtgatcgtggaacggttcaaggccaaagtgaccatcgactgggacagaagcaccaacaccgcctacctgcagctgagcggactgacatctggcgataccgccgtgtactactgtgccaagggcagcaagcaccggctgagagattacgccctgtacgacgatgacggcgccctgaattgggccgtcgatgtggactacctgagcaacctggaattctggggccagggaacagccgtgacagtgtcttccggcggcggaggaagcggagggggaggctctggaggtggtggctctggtggcggaggctcaggcggtggcggatctgattttgtgctgacacagagccctcacagcctgagcgttacacctggcgagagcgccagcatcagctgcaagtctagccactctctgatccacggcgaccggaacaactacctggcttggtacgtgcagaagcccggcagatctcctcagctgctgatctacctggccagcagcagagctagcggcgtgccagatagattttctggcagcggcagcgacaaggatttcaccctgaagatctccagagtggaaaccgaggacgtgggcacctactactgtatgcagggcagagagagcccctggacatttggccagggcaccaaggtggacatcaaaggcggaggtggaagtggtggtggcggtagcggaggcggtgggtccggaggtggtggatctgaacctaagagcagcgacaagacccacacctgtcctccatgtcctgctccagaactgctggccggaccttccgtgttcctgtttcctccaaagcctaaggacaccctgatgatcagcagaacccctgaagtgacctgcgtggtggtggatgtgtctcacgaggaccctgaagtgaagttcaattggtacgtggacggcgtggaagtgcacaacgccaagaccaagcctagagaggaacagtacaacagcacctacagagtggtgtccgtgctgaccgtgctgcaccaggattggctgaacggcaaagagtacaagtgcaaggtgtccaacaaggccctgcctgcccctgaggaaaagaccatcagcaaggccaagggccagcctagggaaccccaggtttacaccctgcctccatgccgcgaggaaatgaccaagaaccaggtgtccctgtggtgcctcgtgaagggcttctacccttccgatatcgccgtggaatgggagagcaatggccagcctgagaacaactacaagacaacccctcctgtgctggacagcgacggctcattcttcctgtacagcaagctgaccgtggacaagtccagatggcagcagggcaacgtgttcagctgtagcgtgctgcacgaagccctgcacagccactacacccagaagtccctgtctctgagccccggcaagtgataa

SEQ ID NO: 760 - RNA, 1653 nt, synthetic construct
  source 1..1653: mol_type = other RNA
atggattggatctggcgcatcctgtttctcgtgggagctgccacaggcgcccactctcaagttcacctgacacagtctggccccgaagtgcggaagcctggcacaagcgtgaaggtgtcctgtaaagcccctggcaacaccctgaaaacctacgacctgcactgggtccgatctgtgcctggacaaggactgcagtggatgggctggattagccacgagggcgacaagaaagtgatcgtggaacggttcaaggccaaagtgaccatcgactgggacagaagcaccaacaccgcctacctgcagctgagcggactgacatctggcgataccgccgtgtactactgtgccaagggcagcaagcaccggctgagagattacgccctgtacgacgatgacggcgccctgaattgggccgtcgatgtggactacctgagcaacctggaattctggggccagggaacagccgtgacagtgtcttccggcggcggaggaagcggagggggaggctctggaggtggtggctctggtggcggaggctcaggcggtggcggatctgattttgtgctgacacagagccctcacagcctgagcgttacacctggcgagagcgccagcatcagctgcaagtctagccactctctgatccacggcgaccggaacaactacctggcttggtacgtgcagaagcccggcagatctcctcagctgctgatctacctggccagcagcagagctagcggcgtgccagatagattttctggcagcggcagcgacaaggatttcaccctgaagatctccagagtggaaaccgaggacgtgggcacctactactgtatgcagggcagagagagcccctggacatttggccagggcaccaaggtggacatcaaaggcggaggtggaagtggtggtggcggtagcggaggcggtgggtccggaggtggtggatctgaacctaagagcagcgacaagacccacacctgtcctccatgtcctgctccagaactgctggccggaccttccgtgttcctgtttcctccaaagcctaaggacaccctgatgatcagcagaacccctgaagtgacctgcgtggtggtggatgtgtctcacgaggaccctgaagtgaagttcaattggtacgtggacggcgtggaagtgcacaacgccaagaccaagcctagagaggaacagtacaacagcacctacagagtggtgtccgtgctgaccgtgctgcaccaggattggctgaacggcaaagagtacaagtgcaaggtgtccaacaaggccctgcctgcccctatcgaaaagaccatcagcaaggccaagggccagcctagggaaccccaggtttacaccctgcctccatgccgcgaggaaatgaccaagaaccaggtgtccctgtggtgcctcgtgaagggcttctacccttccgatatcgccgtggaatgggagagcaatggccagcctgagaacaactacaagacaacccctcctgtgctggacagcgacggctcattcttcctgtacagcaagctgaccgtggacaagtccagatggcagcagggcaacgtgttcagctgtagcgtgctgcacgaagccctgcacagccactacacccagaagtccctgtctctgagccccggcaagtgataa

SEQ ID NO: 761 - RNA, 1653 nt, synthetic construct
  source 1..1653: mol_type = other RNA
atggattggatctggcgcatcctgtttctcgtgggagctgccacaggcgcccactctcaagttcacctgacacagtctggccccgaagtgcggaagcctggcacaagcgtgaaggtgtcctgtaaagcccctggcaacaccctgaaaacctacgacctgcactgggtccgatctgtgcctggacaaggactgcagtggatgggctggattagccacgagggcgacaagaaagtgatcgtggaacggttcaaggccaaagtgaccatcgactgggacagaagcaccaacaccgcctacctgcagctgagcggactgacatctggcgataccgccgtgtactactgtgccaagggcagcaagcaccggctgagagattacgccctgtacgacgatgacggcgccctgaattgggccgtcgatgtggactacctgagcaacctggaattctggggccagggaacagccgtgacagtgtcttccggcggcggaggaagcggagggggaggctctggaggtggtggctctggtggcggaggctcaggcggtggcggatctgattttgtgctgacacagagccctcacagcctgagcgttacacctggcgagagcgccagcatcagctgcaagtctagccactctctgatccacggcgaccggaacaactacctggcttggtacgtgcagaagcccggcagatctcctcagctgctgatctacctggccagcagcagagctagcggcgtgccagatagattttctggcagcggcagcgacaaggatttcaccctgaagatctccagagtggaaaccgaggacgtgggcacctactactgtatgcagggcagagagagcccctggacatttggccagggcaccaaggtggacatcaaaggcggaggtggaagtggtggtggcggtagcggaggcggtgggtccggaggtggtggatctgaacctaagagcagcgacaagacccacacctgtcctccatgtcctgctccagaactgctgggcggaccttccgtgttcctgtttcctccaaagcctaaggacaccctgatgatcagcagaacccctgaagtgacctgcgtggtggtggatgtgtctcacgaggaccctgaagtgaagttcaattggtacgtggacggcgtggaagtgcacaacgccaagaccaagcctagagaggaacagtacaacagcacctacagagtggtgtccgtgctgaccgtgctgcaccaggattggctgaacggcaaagagtacaagtgcaaggtgtccaacaaggccctgcctgcccctgaggaaaagaccatcagcaaggccaagggccagcctagggaaccccaggtttacaccctgcctccatgccgcgaggaaatgaccaagaaccaggtgtccctgtggtgcctcgtgaagggcttctacccttccgatatcgccgtggaatgggagagcaatggccagcctgagaacaactacaagacaacccctcctgtgctggacagcgacggctcattcttcctgtacagcaagctgaccgtggacaagtccagatggcagcagggcaacgtgttcagctgtagcgtgctgcacgaagccctgcacagccactacacccagaagtccctgtctctgagccccggcaagtgataa

SEQ ID NO: 762 - RNA, 1653 nt, synthetic construct; identical to SEQ ID NO: 746
  source 1..1653: mol_type = other RNA

SEQ ID NO: 763 - RNA, 1653 nt, synthetic construct; identical to SEQ ID NO: 747
  source 1..1653: mol_type = other RNA

SEQ ID NO: 764 - RNA, 1653 nt, synthetic construct; identical to SEQ ID NO: 748
  source 1..1653: mol_type = other RNA

SEQ ID NO: 765 - RNA, 1653 nt, synthetic construct; identical to SEQ ID NO: 749
  source 1..1653: mol_type = other RNA

SEQ ID NO: 766 - RNA, 1653 nt, synthetic construct; identical to SEQ ID NO: 750
  source 1..1653: mol_type = other RNA

SEQ ID NO: 767 - RNA, 1653 nt, synthetic construct; identical to SEQ ID NO: 751
  source 1..1653: mol_type = other RNA

SEQ ID NO: 768 - RNA, 1653 nt, synthetic construct; identical to SEQ ID NO: 752
  source 1..1653: mol_type = other RNA

SEQ ID NO: 769 - RNA, 1653 nt, synthetic construct; identical to SEQ ID NO: 753
  source 1..1653: mol_type = other RNA

SEQ ID NO: 770 - RNA, 1653 nt, synthetic construct; identical to SEQ ID NO: 754
  source 1..1653: mol_type = other RNA

SEQ ID NO: 771 - RNA, 1653 nt, synthetic construct; identical to SEQ ID NO: 755
  source 1..1653: mol_type = other RNA

SEQ ID NO: 772 - RNA, 1653 nt, synthetic construct; identical to SEQ ID NO: 756
  source 1..1653: mol_type = other RNA

SEQ ID NO: 773 - RNA, 1653 nt, synthetic construct; identical to SEQ ID NO: 757
  source 1..1653: mol_type = other RNA

SEQ ID NO: 774 - RNA, 1653 nt, synthetic construct; identical to SEQ ID NO: 758
  source 1..1653: mol_type = other RNA

SEQ ID NO: 775 - RNA, 1653 nt, synthetic construct; identical to SEQ ID NO: 759
  source 1..1653: mol_type = other RNA

SEQ ID NO: 776 - RNA, 1653 nt, synthetic construct; identical to SEQ ID NO: 760
  source 1..1653: mol_type = other RNA

SEQ ID NO: 777 - RNA, 1653 nt, synthetic construct; identical to SEQ ID NO: 761
  source 1..1653: mol_type = other RNA

SEQ ID NO: 778 - RNA, 1653 nt, synthetic construct
  source 1..1653: mol_type = other RNA
atggattggatctggcgcatcctgtttctcgtgggagctgccacaggcgcccactctcaagttcacctgacacagtctggccccgaagtgcggaagcctggcacaagcgtgaaggtgtcctgtaaagcccctggcaacaccctgaaaacctacgacctgcactgggtccgatctgtgcctggacaaggactgcagtggatgggctggattagccacgagggcgacaagaaagtgatcgtggaacggttcaaggccaaagtgaccatcgactgggacagaagcaccaacaccgcctacctgcagctgagcggactgacatctggcgataccgccgtgtactactgtgccaagggcagcaagcaccggctgagagattacgccctgtacgacgatgacggcgccctgaattgggccgtcgatgtggactacctgagcaacctggaattctggggccagggaacagccgtgacagtgtcttccggcggcggaggaagcggagggggaggctctggaggtggtggctctggtggcggaggctcaggcggtggcggatctgattttgtgctgacacagagccctcacagcctgagcgttacacctggcgagagcgccagcatcagctgcaagtctagccactctctgatccacggcgaccggaacaactacctggcttggtacgtgcagaagcccggcagatctcctcagctgctgatctacctggccagcagcagagctagcggcgtgccagatagattttctggcagcggcagcgacaaggatttcaccctgaagatctccagagtggaaaccgaggacgtgggcacctactactgtatgcagggcagagagagcccctggacatttggccagggcaccaaggtggacatcaaaggcggaggtggaagtggtggtggcggtagcggaggcggtgggtccggaggtggtggatctgaacctaagagcagcgacaagacccacacctgtcctccatgtcctgctccagaactgctcggcggaccttccgtgttcctgtttcctccaaagcctaaggacaccctgatgatcagcagaacccctgaagtgacctgcgtggtggtggatgtgtctcacgaggaccccgaagtgaagttcaattggtacgtggacggcgtggaagtgcacaacgccaagaccaagcctagagaggaacagtacaacagcacctacagagtggtgtccgtgctgacagtgctgcaccaggattggctgaacggcaaagagtacaagtgcaaggtgtccaacaaggccctgcctgctcctatcgagaaaaccatcagcaaggccaagggccagcctagggaaccccaggtttacacactgcctccaagccgcgacgaactgaccaagaaccaggtgtccctgacctgcctcgtgaagggcttctacccttccgatatcgccgtggaatgggagagcaatggccagcctgagaacaactacaagacaacccctcctgtgctggacagcgacggctcattcttcctgtacagcaagctgactgtggataagtcccggtggcagcagggcaacgtgttcagctgttctgtgatgcacgaagccctgcacaaccactacacccagaaaagcctgtctctgagccccggcaagtgataa

SEQ ID NO: 779 - RNA, 1653 nt, synthetic construct
  source 1..1653: mol_type = other RNA
atggattggatctggcgcatcctgtttctcgtgggagctgccacaggcgcccactctcaagttcacctgacacagtctggccccgaagtgcggaagcctggcacaagcgtgaaggtgtcctgtaaagcccctggcaacaccctgaaaacctacgacctgcactgggtccgatctgtgcctggacaaggactgcagtggatgggctggattagccacgagggcgacaagaaagtgatcgtggaacggttcaaggccaaagtgaccatcgactgggacagaagcaccaacaccgcctacctgcagctgagcggactgacatctggcgataccgccgtgtactactgtgccaagggcagcaagcaccggctgagagattacgccctgtacgacgatgacggcgccctgaattgggccgtcgatgtggactacctgagcaacctggaattctggggccagggaacagccgtgacagtgtcttccggcggcggaggaagcggagggggaggctctggaggtggtggctctggtggcggaggctcaggcggtggcggatctgattttgtgctgacacagagccctcacagcctgagcgttacacctggcgagagcgccagcatcagctgcaagtctagccactctctgatccacggcgaccggaacaactacctggcttggtacgtgcagaagcccggcagatctcctcagctgctgatctacctggccagcagcagagctagcggcgtgccagatagattttctggcagcggcagcgacaaggatttcaccctgaagatctccagagtggaaaccgaggacgtgggcacctactactgtatgcagggcagagagagcccctggacatttggccagggcaccaaggtggacatcaaaggcggaggtggaagtggtggtggcggtagcggaggcggtgggtccggaggtggtggatctgaacctaagagcagcgacaagacccacacctgtcctccatgtcctgctccagaactgctcggcggaccttccgtgttcctgtttcctccaaagcctaaggacaccctgatgatcagcagaacccctgaagtgacctgcgtggtggtggatgtgtctcacgaggaccccgaagtgaagttcaattggtacgtggacggcgtggaagtgcacaacgccaagaccaagcctagagaggaacagtacaacagcacctacagagtggtgtccgtgctgacagtgctgcaccaggattggctgaacggcaaagagtacaagtgcaaggtgtccaacaaggccctgcctgctcctatcgagaaaaccatcagcaaggccaagggccagcctagggaaccccaggtttacacactgcctccaagccgcgacgaactgaccaagaaccaggtgtccctgacctgcctcgtgaagggcttctacccttccgatatcgccgtggaatgggagagcaatggccagcctgagaacaactacaagacaacccctcctgtgctggacagcgacggctcattcttcctgtacagcaagctgaccgtggacaagtccagatggcagcagggcaacgtgttcagctgtagcgtgctgcacgaagccctgcacagccactacacccagaaaagcctgtctctgagccccggcaaatgataa

SEQ ID NO: 780 - RNA, 1653 nt, synthetic construct
  source 1..1653: mol_type = other RNA
atggattggatctggcgcatcctgtttctcgtgggagctgccacaggcgcccactctcaagttcacctgacacagtctggccccgaagtgcggaagcctggcacaagcgtgaaggtgtcctgtaaagcccctggcaacaccctgaaaacctacgacctgcactgggtccgatctgtgcctggacaaggactgcagtggatgggctggattagccacgagggcgacaagaaagtgatcgtggaacggttcaaggccaaagtgaccatcgactgggacagaagcaccaacaccgcctacctgcagctgagcggactgacatctggcgataccgccgtgtactactgtgccaagggcagcaagcaccggctgagagattacgccctgtacgacgatgacggcgccctgaattgggccgtcgatgtggactacctgagcaacctggaattctggggccagggaacagccgtgacagtgtcttccggcggcggaggaagcggagggggaggctctggaggtggtggctctggtggcggaggctcaggcggtggcggatctgattttgtgctgacacagagccctcacagcctgagcgttacacctggcgagagcgccagcatcagctgcaagtctagccactctctgatccacggcgaccggaacaactacctggcttggtacgtgcagaagcccggcagatctcctcagctgctgatctacctggccagcagcagagctagcggcgtgccagatagattttctggcagcggcagcgacaaggatttcaccctgaagatctccagagtggaaaccgaggacgtgggcacctactactgtatgcagggcagagagagcccctggacatttggccagggcaccaaggtggacatcaaaggcggaggtggaagtggtggtggcggtagcggaggcggtgggtccggaggtggtggatctgaacctaagagcagcgacaagacccacacctgtcctccatgtcctgctccagaactgctggccggaccttccgtgttcctgtttcctccaaagcctaaggacaccctgatgatcagcagaacccctgaagtgacctgcgtggtggtggatgtgtctcacgaggaccccgaagtgaagttcaattggtacgtggacggcgtggaagtgcacaatgccaagaccaagcctagagaggaacagtacaacagcacctacagagtggtgtccgtgctgaccgtgctgcaccaggattggctgaacggcaaagagtacaagtgcaaggtgtccaacaaggccctgcctctgcctgaggaaaagaccatcagcaaggccaagggccagcctagggaaccccaggtttacacactgcctccaagccgcgacgaactgaccaagaaccaggtgtccctgacctgcctcgtgaagggcttctacccttccgatatcgccgtggaatgggagagcaatggccagcctgagaacaactacaagacaacccctcctgtgctggacagcgacggctcattcttcctgtacagcaagctgaccgtggacaagtccagatggcagcagggcaacgtgttcagctgtagcgtgctgcacgaagccctgcacagccactacacccagaaaagcctgtctctgagccccggcaaatgataa

SEQ ID NO: 781 - RNA, 1653 nt, synthetic construct
  source 1..1653: mol_type = other RNA
atggattggatctggcgcatcctgtttctcgtgggagctgccacaggcgcccactctcaagttcacctgacacagtctggccccgaagtgcggaagcctggcacaagcgtgaaggtgtcctgtaaagcccctggcaacaccctgaaaacctacgacctgcactgggtccgatctgtgcctggacaaggactgcagtggatgggctggattagccacgagggcgacaagaaagtgatcgtggaacggttcaaggccaaagtgaccatcgactgggacagaagcaccaacaccgcctacctgcagctgagcggactgacatctggcgataccgccgtgtactactgtgccaagggcagcaagcaccggctgagagattacgccctgtacgacgatgacggcgccctgaattgggccgtcgatgtggactacctgagcaacctggaattctggggccagggaacagccgtgacagtgtcttccggcggcggaggaagcggagggggaggctctggaggtggtggctctggtggcggaggctcaggcggtggcggatctgattttgtgctgacacagagccctcacagcctgagcgttacacctggcgagagcgccagcatcagctgcaagtctagccactctctgatccacggcgaccggaacaactacctggcttggtacgtgcagaagcccggcagatctcctcagctgctgatctacctggccagcagcagagctagcggcgtgccagatagattttctggcagcggcagcgacaaggatttcaccctgaagatctccagagtggaaaccgaggacgtgggcacctactactgtatgcagggcagagagagcccctggacatttggccagggcaccaaggtggacatcaaaggcggaggtggaagtggtggtggcggtagcggaggcggtgggtccggaggtggtggatctgaacctaagagcagcgacaagacccacacctgtcctccatgtcctgctccagaactgctggccggaccttccgtgttcctgtttcctccaaagcctaaggacaccctgatgatcagcagaacccctgaagtgacctgcgtggtggtggatgtgtctcacgaggaccctgaagtgaagttcaattggtacgtggacggcgtggaagtgcacaacgccaagaccaagcctagagaggaacagtacaacagcacctacagagtggtgtccgtgctgaccgtgctgcaccaggattggctgaacggcaaagagtacaagtgcaaggtgtccaacaaggccctgcctgcccctgaggaaaagaccatcagcaaggccaagggccagcctagggaaccccaggtttacacactgcctccaagccgcgacgaactgaccaagaaccaggtgtccctgacctgcctcgtgaagggcttctacccttccgatatcgccgtggaatgggagagcaatggccagcctgagaacaactacaagacaacccctcctgtgctggacagcgacggctcattcttcctgtacagcaagctgaccgtggacaagtccagatggcagcagggcaacgtgttcagctgtagcgtgctgcacgaagccctgcacagccactacacccagaaaagcctgtctctgagccccggcaaatgataa

SEQ ID NO: 782 - RNA, 1653 nt, synthetic construct
  source 1..1653: mol_type = other RNA
atggattggatctggcgcatcctgtttctcgtgggagctgccacaggcgcccactctcaagttcacctgacacagtctggccccgaagtgcggaagcctggcacaagcgtgaaggtgtcctgtaaagcccctggcaacaccctgaaaacctacgacctgcactgggtccgatctgtgcctggacaaggactgcagtggatgggctggattagccacgagggcgacaagaaagtgatcgtggaacggttcaaggccaaagtgaccatcgactgggacagaagcaccaacaccgcctacctgcagctgagcggactgacatctggcgataccgccgtgtactactgtgccaagggcagcaagcaccggctgagagattacgccctgtacgacgatgacggcgccctgaattgggccgtcgatgtggactacctgagcaacctggaattctggggccagggaacagccgtgacagtgtcttccggcggcggaggaagcggagggggaggctctggaggtggtggctctggtggcggaggctcaggcggtggcggatctgattttgtgctgacacagagccctcacagcctgagcgttacacctggcgagagcgccagcatcagctgcaagtctagccactctctgatccacggcgaccggaacaactacctggcttggtacgtgcagaagcccggcagatctcctcagctgctgatctacctggccagcagcagagctagcggcgtgccagatagattttctggcagcggcagcgacaaggatttcaccctgaagatctccagagtggaaaccgaggacgtgggcacctactactgtatgcagggcagagagagcccctggacatttggccagggcaccaaggtggacatcaaaggcggaggtggaagtggtggtggcggtagcggaggcggtgggtccggaggtggtggatctgaacctaagagcagcgacaagacccacacctgtcctccatgtcctgctccagaactgctggccggaccttccgtgttcctgtttcctccaaagcctaaggacaccctgatgatcagcagaacccctgaagtgacctgcgtggtggtggatgtgtctcacgaggaccctgaagtgaagttcaattggtacgtggacggcgtggaagtgcacaacgccaagaccaagcctagagaggaacagtacaacagcacctacagagtggtgtccgtgctgaccgtgctgcaccaggattggctgaacggcaaagagtacaagtgcaaggtgtccaacaaggccctgcctgcccctatcgaaaagaccatcagcaaggccaagggccagcctagggaaccccaggtttacacactgcctccaagccgcgacgaactgaccaagaaccaggtgtccctgacctgcctcgtgaagggcttctacccttccgatatcgccgtggaatgggagagcaatggccagcctgagaacaactacaagacaacccctcctgtgctggacagcgacggctcattcttcctgtacagcaagctgaccgtggacaagtccagatggcagcagggcaacgtgttcagctgtagcgtgctgcacgaagccctgcacagccactacacccagaaaagcctgtctctgagccccggcaaatgataa

SEQ ID NO: 783 - RNA, 1653 nt, synthetic construct
  source 1..1653: mol_type = other RNA
atggattggatctggcgcatcctgtttctcgtgggagctgccacaggcgcccactctcaagttcacctgacacagtctggccccgaagtgcggaagcctggcacaagcgtgaaggtgtcctgtaaagcccctggcaacaccctgaaaacctacgacctgcactgggtccgatctgtgcctggacaaggactgcagtggatgggctggattagccacgagggcgacaagaaagtgatcgtggaacggttcaaggccaaagtgaccatcgactgggacagaagcaccaacaccgcctacctgcagctgagcggactgacatctggcgataccgccgtgtactactgtgccaagggcagcaagcaccggctgagagattacgccctgtacgacgatgacggcgccctgaattgggccgtcgatgtggactacctgagcaacctggaattctggggccagggaacagccgtgacagtgtcttccggcggcggaggaagcggagggggaggctctggaggtggtggctctggtggcggaggctcaggcggtggcggatctgattttgtgctgacacagagccctcacagcctgagcgttacacctggcgagagcgccagcatcagctgcaagtctagccactctctgatccacggcgaccggaacaactacctggcttggtacgtgcagaagcccggcagatctcctcagctgctgatctacctggccagcagcagagctagcggcgtgccagatagattttctggcagcggcagcgacaaggatttcaccctgaagatctccagagtggaaaccgaggacgtgggcacctactactgtatgcagggcagagagagcccctggacatttggccagggcaccaaggtggacatcaaaggcggaggtggaagtggtggtggcggtagcggaggcggtgggtccggaggtggtggatctgaacctaagagcagcgacaagacccacacctgtcctccatgtcctgctccagaactgctgggcggaccttccgtgttcctgtttcctccaaagcctaaggacaccctgatgatcagcagaacccctgaagtgacctgcgtggtggtggatgtgtctcacgaggaccctgaagtgaagttcaattggtacgtggacggcgtggaagtgcacaacgccaagaccaagcctagagaggaacagtacaacagcacctacagagtggtgtccgtgctgaccgtgctgcaccaggattggctgaacggcaaagagtacaagtgcaaggtgtccaacaaggccctgcctgcccctgaggaaaagaccatcagcaaggccaagggccagcctagggaaccccaggtttacacactgcctccaagccgcgacgaactgaccaagaaccaggtgtccctgacctgcctcgtgaagggcttctacccttccgatatcgccgtggaatgggagagcaatggccagcctgagaacaactacaagacaacccctcctgtgctggacagcgacggctcattcttcctgtacagcaagctgaccgtggacaagtccagatggcagcagggcaacgtgttcagctgtagcgtgctgcacgaagccctgcacagccactacacccagaaaagcctgtctctgagccccggcaaatgataa

SEQ ID NO: 784 - RNA, 1653 nt, synthetic construct
  source 1..1653: mol_type = other RNA
atggattggatctggcgcatcctgtttctcgtgggagctgccacaggcgcccactctcaagttcacctgacacagtctggccccgaagtgcggaagcctggcacaagcgtgaaggtgtcctgtaaagcccctggcaacaccctgaaaacctacgacctgcactgggtccgatctgtgcctggacaaggactgcagtggatgggctggattagccacgagggcgacaagaaagtgatcgtggaacggttcaaggccaaagtgaccatcgactgggacagaagcaccaacaccgcctacctgcagctgagcggactgacatctggcgataccgccgtgtactactgtgccaagggcagcaagcaccggctgagagattacgccctgtacgacgatgacggcgccctgaattgggccgtcgatgtggactacctgagcaacctggaattctggggccagggaacagccgtgacagtgtcttccggcggcggaggaagcggagggggaggctctggaggtggtggctctggtggcggaggctcaggcggtggcggatctgattttgtgctgacacagagccctcacagcctgagcgttacacctggcgagagcgccagcatcagctgcaagtctagccactctctgatccacggcgaccggaacaactacctggcttggtacgtgcagaagcccggcagatctcctcagctgctgatctacctggccagcagcagagctagcggcgtgccagatagattttctggcagcggcagcgacaaggatttcaccctgaagatctccagagtggaaaccgaggacgtgggcacctactactgtatgcagggcagagagagcccctggacatttggccagggcaccaaggtggacatcaaaggcggaggtggaagtggtggtggcggtagcggaggcggtgggtccggaggtggtggatctgaacctaagagcagcgacaagacccacacctgtcctccatgtcctgctccagaactgctcggcggaccttccgtgttcctgtttcctccaaagcctaaggacaccctgatgatcagcagaacccctgaagtgacctgcgtggtggtggatgtgtctcacgaggaccccgaagtgaagttcaattggtacgtggacggcgtggaagtgcacaacgccaagaccaagcctagagaggaacagtacaacagcacctacagagtggtgtccgtgctgacagtgctgcaccaggattggctgaacggcaaagagtacaagtgcaaggtgtccaacaaggccctgcctgctcctatcgagaaaaccatcagcaaggccaagggccagcctcgcgaacctcaagtctgtacactgcctcctagccgcgacgaactgaccaagaaccaggtgtccctgagctgcgccgtgaagggcttttacccttccgatatcgccgtggaatgggagagcaatggccagcctgagaacaactacaagacaacccctcctgtgctggacagcgacggctcattcttcctggtgtccaagctgacagtggacaagagcagatggcagcagggcaacgtgttcagctgcagcgtgctgcatgaagccctgcacagccactacacccagaagtccctgtctctgagccccggcaagtgataa

SEQ ID NO: 785 - RNA, 1653 nt, synthetic construct
  source 1..1653: mol_type = other RNA
atggattggatctggcgcatcctgtttctcgtgggagctgccacaggcgcccactctcaagttcacctgacacagtctggccccgaagtgcggaagcctggcacaagcgtgaaggtgtcctgtaaagcccctggcaacaccctgaaaacctacgacctgcactgggtccgatctgtgcctggacaaggactgcagtggatgggctggattagccacgagggcgacaagaaagtgatcgtggaacggttcaaggccaaagtgaccatcgactgggacagaagcaccaacaccgcctacctgcagctgagcggactgacatctggcgataccgccgtgtactactgtgccaagggcagcaagcaccggctgagagattacgccctgtacgacgatgacggcgccctgaattgggccgtcgatgtggactacctgagcaacctggaattctggggccagggaacagccgtgacagtgtcttccggcggcggaggaagcggagggggaggctctggaggtggtggctctggtggcggaggctcaggcggtggcggatctgattttgtgctgacacagagccctcacagcctgagcgttacacctggcgagagcgccagcatcagctgcaagtctagccactctctgatccacggcgaccggaacaactacctggcttggtacgtgcagaagcccggcagatctcctcagctgctgatctacctggccagcagcagagctagcggcgtgccagatagattttctggcagcggcagcgacaaggatttcaccctgaagatctccagagtggaaaccgaggacgtgggcacctactactgtatgcagggcagagagagcccctggacatttggccagggcaccaaggtggacatcaaaggcggaggtggaagtggtggtggcggtagcggaggcggtgggtccggaggtggtggatctgaacctaagagcagcgacaagacccacacctgtcctccatgtcctgctccagaactgctggccggaccttccgtgttcctgtttcctccaaagcctaaggacaccctgatgatcagcagaacccctgaagtgacctgcgtggtggtggatgtgtctcacgaggaccccgaagtgaagttcaattggtacgtggacggcgtggaagtgcacaatgccaagaccaagcctagagaggaacagtacaacagcacctacagagtggtgtccgtgctgaccgtgctgcaccaggattggctgaacggcaaagagtacaagtgcaaggtgtccaacaaggccctgcctctgcctgaggaaaagaccatcagcaaggccaagggccagcctcgcgaacctcaagtctgtacactgcctcctagccgcgacgaactgaccaagaaccaggtgtccctgagctgcgccgtgaagggcttttacccttccgatatcgccgtggaatgggagagcaatggccagcctgagaacaactacaagacaacccctcctgtgctggacagcgacggctcattcttcctggtgtccaagctgacagtggacaagagcagatggcagcagggcaacgtgttcagctgcagcgtgctgcatgaagccctgcacagccactacacccagaagtccctgtctctgagccccggcaagtgataa

SEQ ID NO: 786 - RNA, 1653 nt, synthetic construct
  source 1..1653: mol_type = other RNA
atggattggatctggcgcatcctgtttctcgtgggagctgccacaggcgcccactctcaagttcacctgacacagtctggccccgaagtgcggaagcctggcacaagcgtgaaggtgtcctgtaaagcccctggcaacaccctgaaaacctacgacctgcactgggtccgatctgtgcctggacaaggactgcagtggatgggctggattagccacgagggcgacaagaaagtgatcgtggaacggttcaaggccaaagtgaccatcgactgggacagaagcaccaacaccgcctacctgcagctgagcggactgacatctggcgataccgccgtgtactactgtgccaagggcagcaagcaccggctgagagattacgccctgtacgacgatgacggcgccctgaattgggccgtcgatgtggactacctgagcaacctggaattctggggccagggaacagccgtgacagtgtcttccggcggcggaggaagcggagggggaggctctggaggtggtggctctggtggcggaggctcaggcggtggcggatctgattttgtgctgacacagagccctcacagcctgagcgttacacctggcgagagcgccagcatcagctgcaagtctagccactctctgatccacggcgaccggaacaactacctggcttggtacgtgcagaagcccggcagatctcctcagctgctgatctacctggccagcagcagagctagcggcgtgccagatagattttctggcagcggcagcgacaaggatttcaccctgaagatctccagagtggaaaccgaggacgtgggcacctactactgtatgcagggcagagagagcccctggacatttggccagggcaccaaggtggacatcaaaggcggaggtggaagtggtggtggcggtagcggaggcggtgggtccggaggtggtggatctgaacctaagagcagcgacaagacccacacctgtcctccatgtcctgctccagaactgctggccggaccttccgtgttcctgtttcctccaaagcctaaggacaccctgatgatcagcagaacccctgaagtgacctgcgtggtggtggatgtgtctcacgaggaccctgaagtgaagttcaattggtacgtggacggcgtggaagtgcacaacgccaagaccaagcctagagaggaacagtacaacagcacctacagagtggtgtccgtgctgaccgtgctgcaccaggattggctgaacggcaaagagtacaagtgcaaggtgtccaacaaggccctgcctgcccctgaggaaaagaccatcagcaaggccaagggccagcctcgcgaacctcaagtctgtacactgcctcctagccgcgacgaactgaccaagaaccaggtgtccctgagctgcgccgtgaagggcttttacccttccgatatcgccgtggaatgggagagcaatggccagcctgagaacaactacaagacaacccctcctgtgctggacagcgacggctcattcttcctggtgtccaagctgacagtggacaagagcagatggcagcagggcaacgtgttcagctgcagcgtgctgcatgaagccctgcacagccactacacccagaagtccctgtctctgagccccggcaagtgataa

SEQ ID NO: 787 - RNA, 1653 nt, synthetic construct
  source 1..1653: mol_type = other RNA
atggattggatctggcgcatcctgtttctcgtgggagctgccacaggcgcccactctcaagttcacctgacacagtctggccccgaagtgcggaagcctggcacaagcgtgaaggtgtcctgtaaagcccctggcaacaccctgaaaacctacgacctgcactgggtccgatctgtgcctggacaaggactgcagtggatgggctggattagccacgagggcgacaagaaagtgatcgtggaacggttcaaggccaaagtgaccatcgactgggacagaagcaccaacaccgcctacctgcagctgagcggactgacatctggcgataccgccgtgtactactgtgccaagggcagcaagcaccggctgagagattacgccctgtacgacgatgacggcgccctgaattgggccgtcgatgtggactacctgagcaacctggaattctggggccagggaacagccgtgacagtgtcttccggcggcggaggaagcggagggggaggctctggaggtggtggctctggtggcggaggctcaggcggtggcggatctgattttgtgctgacacagagccctcacagcctgagcgttacacctggcgagagcgccagcatcagctgcaagtctagccactctctgatccacggcgaccggaacaactacctggcttggtacgtgcagaagcccggcagatctcctcagctgctgatctacctggccagcagcagagctagcggcgtgccagatagattttctggcagcggcagcgacaaggatttcaccctgaagatctccagagtggaaaccgaggacgtgggcacctactactgtatgcagggcagagagagcccctggacatttggccagggcaccaaggtggacatcaaaggcggaggtggaagtggtggtggcggtagcggaggcggtgggtccggaggtggtggatctgaacctaagagcagcgacaagacccacacctgtcctccatgtcctgctccagaactgctggccggaccttccgtgttcctgtttcctccaaagcctaaggacaccctgatgatcagcagaacccctgaagtgacctgcgtggtggtggatgtgtctcacgaggaccctgaagtgaagttcaattggtacgtggacggcgtggaagtgcacaacgccaagaccaagcctagagaggaacagtacaacagcacctacagagtggtgtccgtgctgaccgtgctgcaccaggattggctgaacggcaaagagtacaagtgcaaggtgtccaacaaggccctgcctgcccctatcgaaaagaccatcagcaaggccaagggccagcctcgcgaacctcaagtctgtacactgcctcctagccgcgacgaactgaccaagaaccaggtgtccctgagctgcgccgtgaagggcttttacccttccgatatcgccgtggaatgggagagcaatggccagcctgagaacaactacaagacaacccctcctgtgctggacagcgacggctcattcttcctggtgtccaagctgacagtggacaagagcagatggcagcagggcaacgtgttcagctgcagcgtgctgcatgaagccctgcacagccactacacccagaagtccctgtctctgagccccggcaagtgataa

SEQ ID NO: 788 - RNA, 1653 nt, synthetic construct
  source 1..1653: mol_type = other RNA
atggattggatctggcgcatcctgtttctcgtgggagctgccacaggcgcccactctcaagttcacctgacacagtctggccccgaagtgcggaagcctggcacaagcgtgaaggtgtcctgtaaagcccctggcaacaccctgaaaacctacgacctgcactgggtccgatctgtgcctggacaaggactgcagtggatgggctggattagccacgagggcgacaagaaagtgatcgtggaacggttcaaggccaaagtgaccatcgactgggacagaagcaccaacaccgcctacctgcagctgagcggactgacatctggcgataccgccgtgtactactgtgccaagggcagcaagcaccggctgagagattacgccctgtacgacgatgacggcgccctgaattgggccgtcgatgtggactacctgagcaacctggaattctggggccagggaacagccgtgacagtgtcttccggcggcggaggaagcggagggggaggctctggaggtggtggctctggtggcggaggctcaggcggtggcggatctgattttgtgctgacacagagccctcacagcctgagcgttacacctggcgagagcgccagcatcagctgcaagtctagccactctctgatccacggcgaccggaacaactacctggcttggtacgtgcagaagcccggcagatctcctcagctgctgatctacctggccagcagcagagctagcggcgtgccagatagattttctggcagcggcagcgacaaggatttcaccctgaagatctccagagtggaaaccgaggacgtgggcacctactactgtatgcagggcagagagagcccctggacatttggccagggcaccaaggtggacatcaaaggcggaggtggaagtggtggtggcggtagcggaggcggtgggtccggaggtggtggatctgaacctaagagcagcgacaagacccacacctgtcctccatgtcctgctccagaactgctgggcggaccttccgtgttcctgtttcctccaaagcctaaggacaccctgatgatcagcagaacccctgaagtgacctgcgtggtggtggatgtgtctcacgaggaccctgaagtgaagttcaattggtacgtggacggcgtggaagtgcacaacgccaagaccaagcctagagaggaacagtacaacagcacctacagagtggtgtccgtgctgaccgtgctgcaccaggattggctgaacggcaaagagtacaagtgcaaggtgtccaacaaggccctgcctgcccctgaggaaaagaccatcagcaaggccaagggccagcctcgcgaacctcaagtctgtacactgcctcctagccgcgacgaactgaccaagaaccaggtgtccctgagctgcgccgtgaagggcttttacccttccgatatcgccgtggaatgggagagcaatggccagcctgagaacaactacaagacaacccctcctgtgctggacagcgacggctcattcttcctggtgtccaagctgacagtggacaagagcagatggcagcagggcaacgtgttcagctgcagcgtgctgcatgaagccctgcacagccactacacccagaagtccctgtctctgagccccggcaagtgataa

SEQ ID NO: 789 - RNA, 1653 nt, synthetic construct
  source 1..1653: mol_type = other RNA
atggattggatctggcgcatcctgtttctcgtgggagctgccacaggcgcccactctcaagttcacctgacacagtctggccccgaagtgcggaagcctggcacaagcgtgaaggtgtcctgtaaagcccctggcaacaccctgaaaacctacgacctgcactgggtccgatctgtgcctggacaaggactgcagtggatgggctggattagccacgagggcgacaagaaagtgatcgtggaacggttcaaggccaaagtgaccatcgactgggacagaagcaccaacaccgcctacctgcagctgagcggactgacatctggcgataccgccgtgtactactgtgccaagggcagcaagcaccggctgagagattacgccctgtacgacgatgacggcgccctgaattgggccgtcgatgtggactacctgagcaacctggaattctggggccagggaacagccgtgacagtgtcttccggcggcggaggaagcggagggggaggctctggaggtggtggctctggtggcggaggctcaggcggtggcggatctgattttgtgctgacacagagccctcacagcctgagcgttacacctggcgagagcgccagcatcagctgcaagtctagccactctctgatccacggcgaccggaacaactacctggcttggtacgtgcagaagcccggcagatctcctcagctgctgatctacctggccagcagcagagctagcggcgtgccagatagattttctggcagcggcagcgacaaggatttcaccctgaagatctccagagtggaaaccgaggacgtgggcacctactactgtatgcagggcagagagagcccctggacatttggccagggcaccaaggtggacatcaaaggcggaggtggaagtggtggtggcggtagcggaggcggtgggtccggaggtggtggatctgaacctaagagcagcgacaagacccacacctgtcctccatgtcctgctccagaactgctcggcggaccttccgtgttcctgtttcctccaaagcctaaggacaccctgatgatcagcagaacccctgaagtgacctgcgtggtggtggatgtgtctcacgaggaccccgaagtgaagttcaattggtacgtggacggcgtggaagtgcacaacgccaagaccaagcctagagaggaacagtacaacagcacctacagagtggtgtccgtgctgacagtgctgcaccaggattggctgaacggcaaagagtacaagtgcaaggtgtccaacaaggccctgcctgctcctatcgagaaaaccatcagcaaggccaagggccagcctagggaaccccaggtttacaccctgcctccatgccgcgacgaactgaccaagaaccaggtgtccctgtggtgcctggtcaagggcttctacccttccgatatcgccgtggaatgggagagcaatggccagcctgagaacaactacaagacaacccctcctgtgctggacagcgacggctcattcttcctgtacagcaagctgacagtggacaagagcagatggcagcagggcaacgtgttcagctgcagcgtgctgcatgaagccctgcacagccactacacccagaagtccctgtctctgagccccggcaagtgataa

SEQ ID NO: 790 - RNA, 1653 nt, synthetic construct
  source 1..1653: mol_type = other RNA
atggattggatctggcgcatcctgtttctcgtgggagctgccacaggcgcccactctcaagttcacctgacacagtctggccccgaagtgcggaagcctggcacaagcgtgaaggtgtcctgtaaagcccctggcaacaccctgaaaacctacgacctgcactgggtccgatctgtgcctggacaaggactgcagtggatgggctggattagccacgagggcgacaagaaagtgatcgtggaacggttcaaggccaaagtgaccatcgactgggacagaagcaccaacaccgcctacctgcagctgagcggactgacatctggcgataccgccgtgtactactgtgccaagggcagcaagcaccggctgagagattacgccctgtacgacgatgacggcgccctgaattgggccgtcgatgtggactacctgagcaacctggaattctggggccagggaacagccgtgacagtgtcttccggcggcggaggaagcggagggggaggctctggaggtggtggctctggtggcggaggctcaggcggtggcggatctgattttgtgctgacacagagccctcacagcctgagcgttacacctggcgagagcgccagcatcagctgcaagtctagccactctctgatccacggcgaccggaacaactacctggcttggtacgtgcagaagcccggcagatctcctcagctgctgatctacctggccagcagcagagctagcggcgtgccagatagattttctggcagcggcagcgacaaggatttcaccctgaagatctccagagtggaaaccgaggacgtgggcacctactactgtatgcagggcagagagagcccctggacatttggccagggcaccaaggtggacatcaaaggcggaggtggaagtggtggtggcggtagcggaggcggtgggtccggaggtggtggatctgaacctaagagcagcgacaagacccacacctgtcctccatgtcctgctccagaactgctggccggaccttccgtgttcctgtttcctccaaagcctaaggacaccctgatgatcagcagaacccctgaagtgacctgcgtggtggtggatgtgtctcacgaggaccccgaagtgaagttcaattggtacgtggacggcgtggaagtgcacaatgccaagaccaagcctagagaggaacagtacaacagcacctacagagtggtgtccgtgctgaccgtgctgcaccaggattggctgaacggcaaagagtacaagtgcaaggtgtccaacaaggccctgcctctgcctgaggaaaagaccatcagcaaggccaagggccagcctagggaaccccaggtttacaccctgcctccatgccgcgacgaactgaccaagaaccaggtgtccctgtggtgcctggtcaagggcttctacccttccgatatcgccgtggaatgggagagcaatggccagcctgagaacaactacaagacaacccctcctgtgctggacagcgacggctcattcttcctgtacagcaagctgacagtggacaagagcagatggcagcagggcaacgtgttcagctgcagcgtgctgcatgaagccctgcacagccactacacccagaagtccctgtctctgagccccggcaagtgataa

SEQ ID NO: 791 - RNA, 1653 nt, synthetic construct
  source 1..1653: mol_type = other RNA
atggattggatctggcgcatcctgtttctcgtgggagctgccacaggcgcccactctcaagttcacctgacacagtctggccccgaagtgcggaagcctggcacaagcgtgaaggtgtcctgtaaagcccctggcaacaccctgaaaacctacgacctgcactgggtccgatctgtgcctggacaaggactgcagtggatgggctggattagccacgagggcgacaagaaagtgatcgtggaacggttcaaggccaaagtgaccatcgactgggacagaagcaccaacaccgcctacctgcagctgagcggactgacatctggcgataccgccgtgtactactgtgccaagggcagcaagcaccggctgagagattacgccctgtacgacgatgacggcgccctgaattgggccgtcgatgtggactacctgagcaacctggaattctggggccagggaacagccgtgacagtgtcttccggcggcggaggaagcggagggggaggctctggaggtggtggctctggtggcggaggctcaggcggtggcggatctgattttgtgctgacacagagccctcacagcctgagcgttacacctggcgagagcgccagcatcagctgcaagtctagccactctctgatccacggcgaccggaacaactacctggcttggtacgtgcagaagcccggcagatctcctcagctgctgatctacctggccagcagcagagctagcggcgtgccagatagattttctggcagcggcagcgacaaggatttcaccctgaagatctccagagtggaaaccgaggacgtgggcacctactactgtatgcagggcagagagagcccctggacatttggccagggcaccaaggtggacatcaaaggcggaggtggaagtggtggtggcggtagcggaggcggtgggtccggaggtggtggatctgaacctaagagcagcgacaagacccacacctgtcctccatgtcctgctccagaactgctggccggaccttccgtgttcctgtttcctccaaagcctaaggacaccctgatgatcagcagaacccctgaagtgacctgcgtggtggtggatgtgtctcacgaggaccctgaagtgaagttcaattggtacgtggacggcgtggaagtgcacaacgccaagaccaagcctagagaggaacagtacaacagcacctacagagtggtgtccgtgctgaccgtgctgcaccaggattggctgaacggcaaagagtacaagtgcaaggtgtccaacaaggccctgcctgcccctgaggaaaagaccatcagcaaggccaagggccagcctagggaaccccaggtttacaccctgcctccatgccgcgacgaactgaccaagaaccaggtgtccctgtggtgcctggtcaagggcttctacccttccgatatcgccgtggaatgggagagcaatggccagcctgagaacaactacaagacaacccctcctgtgctggacagcgacggctcattcttcctgtacagcaagctgacagtggacaagagcagatggcagcagggcaacgtgttcagctgcagcgtgctgcatgaagccctgcacagccactacacccagaagtccctgtctctgagccccggcaagtgataa

SEQ ID NO: 792 - RNA, 1653 nt, synthetic construct
  source 1..1653: mol_type = other RNA
atggattggatctggcgcatcctgtttctcgtgggagctgccacaggcgcccactctcaagttcacctgacacagtctggccccgaagtgcggaagcctggcacaagcgtgaaggtgtcctgtaaagcccctggcaacaccctgaaaacctacgacctgcactgggtccgatctgtgcctggacaaggactgcagtggatgggctggattagccacgagggcgacaagaaagtgatcgtggaacggttcaaggccaaagtgaccatcgactgggacagaagcaccaacaccgcctacctgcagctgagcggactgacatctggcgataccgccgtgtactactgtgccaagggcagcaagcaccggctgagagattacgccctgtacgacgatgacggcgccctgaattgggccgtcgatgtggactacctgagcaacctggaattctggggccagggaacagccgtgacagtgtcttccggcggcggaggaagcggagggggaggctctggaggtggtggctctggtggcggaggctcaggcggtggcggatctgattttgtgctgacacagagccctcacagcctgagcgttacacctggcgagagcgccagcatcagctgcaagtctagccactctctgatccacggcgaccggaacaactacctggcttggtacgtgcagaagcccggcagatctcctcagctgctgatctacctggccagcagcagagctagcggcgtgccagatagattttctggcagcggcagcgacaaggatttcaccctgaagatctccagagtggaaaccgaggacgtgggcacctactactgtatgcagggcagagagagcccctggacatttggccagggcaccaaggtggacatcaaaggcggaggtggaagtggtggtggcggtagcggaggcggtgggtccggaggtggtggatctgaacctaagagcagcgacaagacccacacctgtcctccatgtcctgctccagaactgctggccggaccttccgtgttcctgtttcctccaaagcctaaggacaccctgatgatcagcagaacccctgaagtgacctgcgtggtggtggatgtgtctcacgaggaccctgaagtgaagttcaattggtacgtggacggcgtggaagtgcacaacgccaagaccaagcctagagaggaacagtacaacagcacctacagagtggtgtccgtgctgaccgtgctgcaccaggattggctgaacggcaaagagtacaagtgcaaggtgtccaacaaggccctgcctgcccctatcgaaaagaccatcagcaaggccaagggccagcctagggaaccccaggtttacaccctgcctccatgccgcgacgaactgaccaagaaccaggtgtccctgtggtgcctggtcaagggcttctacccttccgatatcgccgtggaatgggagagcaatggccagcctgagaacaactacaagacaacccctcctgtgctggacagcgacggctcattcttcctgtacagcaagctgacagtggacaagagcagatggcagcagggcaacgtgttcagctgcagcgtgctgcatgaagccctgcacagccactacacccagaagtccctgtctctgagccccggcaagtgataa

SEQ ID NO: 793 - RNA, 1653 nt, synthetic construct
  source 1..1653: mol_type = other RNA
atggattggatctggcgcatcctgtttctcgtgggagctgccacaggcgcccactctcaagttcacctgacacagtctggccccgaagtgcggaagcctggcacaagcgtgaaggtgtcctgtaaagcccctggcaacaccctgaaaacctacgacctgcactgggtccgatctgtgcctggacaaggactgcagtggatgggctggattagccacgagggcgacaagaaagtgatcgtggaacggttcaaggccaaagtgaccatcgactgggacagaagcaccaacaccgcctacctgcagctgagcggactgacatctggcgataccgccgtgtactactgtgccaagggcagcaagcaccggctgagagattacgccctgtacgacgatgacggcgccctgaattgggccgtcgatgtggactacctgagcaacctggaattctggggccagggaacagccgtgacagtgtcttccggcggcggaggaagcggagggggaggctctggaggtggtggctctggtggcggaggctcaggcggtggcggatctgattttgtgctgacacagagccctcacagcctgagcgttacacctggcgagagcgccagcatcagctgcaagtctagccactctctgatccacggcgaccggaacaactacctggcttggtacgtgcagaagcccggcagatctcctcagctgctgatctacctggccagcagcagagctagcggcgtgccagatagattttctggcagcggcagcgacaaggatttcaccctgaagatctccagagtggaaaccgaggacgtgggcacctactactgtatgcagggcagagagagcccctggacatttggccagggcaccaaggtggacatcaaaggcggaggtggaagtggtggtggcggtagcggaggcggtgggtccggaggtggtggatctgaacctaagagcagcgacaagacccacacctgtcctccatgtcctgctccagaactgctgggcggaccttccgtgttcctgtttcctccaaagcctaaggacaccctgatgatcagcagaacccctgaagtgacctgcgtggtggtggatgtgtctcacgaggaccctgaagtgaagttcaattggtacgtggacggcgtggaagtgcacaacgccaagaccaagcctagagaggaacagtacaacagcacctacagagtggtgtccgtgctgaccgtgctgcaccaggattggctgaacggcaaagagtacaagtgcaaggtgtccaacaaggccctgcctgcccctgaggaaaagaccatcagcaaggccaagggccagcctagggaaccccaggtttacaccctgcctccatgccgcgacgaactgaccaagaaccaggtgtccctgtggtgcctggtcaagggcttctacccttccgatatcgccgtggaatgggagagcaatggccagcctgagaacaactacaagacaacccctcctgtgctggacagcgacggctcattcttcctgtacagcaagctgacagtggacaagagcagatggcagcagggcaacgtgttcagctgcagcgtgctgcatgaagccctgcacagccactacacccagaagtccctgtctctgagccccggcaagtgataa

SEQ ID NO: 794 - RNA, 1653 nt, synthetic construct
  source 1..1653: mol_type = other RNA
atggattggatctggcgcatcctgtttctcgtgggagctgccacaggcgcccacagcgattttgtgctgacacagtctccccacagcctgagcgttacacctggcgagtctgccagcatcagctgcaagtctagccactctctgatccacggcgaccggaacaactacctggcttggtacgtgcagaagcccggcagatctcctcagctgctgatctacctggccagcagcagagcttctggcgtgcccgatagattttctggcagcggcagcgacaaggacttcaccctgaagatctccagagtggaaaccgaggacgtgggcacctactactgtatgcagggcagagagagcccctggacatttggccagggcaccaaggtggacatcaaaggcggcggaggaagcggaggcggaggttctggtggtggtggctctggtggcggaggctcaggcggtggcggatctcaagttcatctgacacagagcggccctgaagtgcggaagcctggcacaagcgtgaaggtgtcctgtaaagcccctggcaacaccctgaaaacctacgacctgcactgggtccgatctgtgcctggacagggactgcaatggatgggctggattagccacgagggcgacaagaaagtgatcgtggaacggttcaaggccaaagtgaccatcgactgggacagaagcaccaacaccgcctacctgcagctgagcggactgacatctggcgataccgccgtgtactactgtgccaagggcagcaagcaccggctgagagattacgccctgtacgacgatgacggcgccctgaattgggccgtcgatgtggactacctgagcaacctggaattctggggccagggaacagccgtgacagtgtcttccggcggaggtggaagtggtggcggcggatctggcggcggtgggtccggaggtggtggatctgaacctaagagcagcgacaagacccacacctgtcctccatgtcctgctccagaactgctcggcggaccttccgtgttcctgtttcctccaaagcctaaggacaccctgatgatcagcagaacccctgaagtgacctgcgtggtggtggatgtgtctcacgaggaccccgaagtgaagttcaattggtacgtggacggcgtggaagtgcacaacgccaagaccaagcctagagaggaacagtacaacagcacctacagagtggtgtccgtgctgacagtgctgcaccaggattggctgaacggcaaagagtacaagtgcaaggtgtccaacaaggccctgcctgctcctatcgagaaaaccatcagcaaggccaagggccagcctagggaaccccaggtttacacactgcctccaagccgcgaggaaatgaccaagaaccaggtgtccctgacctgcctcgtgaagggcttctacccttccgatatcgccgtggaatgggagagcaatggccagcctgagaacaactacaagacaacccctcctgtgctggacagcgacggctcattcttcctgtacagcaagctgactgtggataagtcccggtggcagcagggcaacgtgttcagctgttctgtgatgcacgaagccctgcacaaccactacacccagaaaagcctgtctctgagccccggcaagtgataa

SEQ ID NO: 795 - RNA, 1653 nt, synthetic construct
  source 1..1653: mol_type = other RNA
atggattggatctggcgcatcctgtttctcgtgggagctgccacaggcgcccacagcgattttgtgctgacacagtctccccacagcctgagcgttacacctggcgagtctgccagcatcagctgcaagtctagccactctctgatccacggcgaccggaacaactacctggcttggtacgtgcagaagcccggcagatctcctcagctgctgatctacctggccagcagcagagcttctggcgtgcccgatagattttctggcagcggcagcgacaaggacttcaccctgaagatctccagagtggaaaccgaggacgtgggcacctactactgtatgcagggcagagagagcccctggacatttggccagggcaccaaggtggacatcaaaggcggcggaggaagcggaggcggaggttctggtggtggtggctctggtggcggaggctcaggcggtggcggatctcaagttcatctgacacagagcggccctgaagtgcggaagcctggcacaagcgtgaaggtgtcctgtaaagcccctggcaacaccctgaaaacctacgacctgcactgggtccgatctgtgcctggacagggactgcaatggatgggctggattagccacgagggcgacaagaaagtgatcgtggaacggttcaaggccaaagtgaccatcgactgggacagaagcaccaacaccgcctacctgcagctgagcggactgacatctggcgataccgccgtgtactactgtgccaagggcagcaagcaccggctgagagattacgccctgtacgacgatgacggcgccctgaattgggccgtcgatgtggactacctgagcaacctggaattctggggccagggaacagccgtgacagtgtcttccggcggaggtggaagtggtggcggcggatctggcggcggtgggtccggaggtggtggatctgaacctaagagcagcgacaagacccacacctgtcctccatgtcctgctccagaactgctcggcggaccttccgtgttcctgtttcctccaaagcctaaggacaccctgatgatcagcagaacccctgaagtgacctgcgtggtggtggatgtgtctcacgaggaccccgaagtgaagttcaattggtacgtggacggcgtggaagtgcacaacgccaagaccaagcctagagaggaacagtacaacagcacctacagagtggtgtccgtgctgacagtgctgcaccaggattggctgaacggcaaagagtacaagtgcaaggtgtccaacaaggccctgcctgctcctatcgagaaaaccatcagcaaggccaagggccagcctagggaaccccaggtttacacactgcctccaagccgcgaggaaatgaccaagaaccaggtgtccctgacctgcctcgtgaagggcttctacccttccgatatcgccgtggaatgggagagcaatggccagcctgagaacaactacaagacaacccctcctgtgctggacagcgacggctcattcttcctgtacagcaagctgaccgtggacaagtccagatggcagcagggcaacgtgttcagctgtagcgtgctgcacgaagccctgcacagccactacacccagaaaagcctgtctctgagccccggcaaatgataa

SEQ ID NO: 796 - RNA, 1653 nt, synthetic construct
  source 1..1653: mol_type = other RNA
atggattggatctggcgcatcctgtttctcgtgggagctgccacaggcgcccacagcgattttgtgctgacacagtctccccacagcctgagcgttacacctggcgagtctgccagcatcagctgcaagtctagccactctctgatccacggcgaccggaacaactacctggcttggtacgtgcagaagcccggcagatctcctcagctgctgatctacctggccagcagcagagcttctggcgtgcccgatagattttctggcagcggcagcgacaaggacttcaccctgaagatctccagagtggaaaccgaggacgtgggcacctactactgtatgcagggcagagagagcccctggacatttggccagggcaccaaggtggacatcaaaggcggcggaggaagcggaggcggaggttctggtggtggtggctctggtggcggaggctcaggcggtggcggatctcaagttcatctgacacagagcggccctgaagtgcggaagcctggcacaagcgtgaaggtgtcctgtaaagcccctggcaacaccctgaaaacctacgacctgcactgggtccgatctgtgcctggacagggactgcaatggatgggctggattagccacgagggcgacaagaaagtgatcgtggaacggttcaaggccaaagtgaccatcgactgggacagaagcaccaacaccgcctacctgcagctgagcggactgacatctggcgataccgccgtgtactactgtgccaagggcagcaagcaccggctgagagattacgccctgtacgacgatgacggcgccctgaattgggccgtcgatgtggactacctgagcaacctggaattctggggccagggaacagccgtgacagtgtcttccggcggaggtggaagtggtggcggcggatctggcggcggtgggtccggaggtggtggatctgaacctaagagcagcgacaagacccacacctgtcctccatgtcctgctccagaactgctggccggaccttccgtgttcctgtttcctccaaagcctaaggacaccctgatgatcagcagaacccctgaagtgacctgcgtggtggtggatgtgtctcacgaggaccccgaagtgaagttcaattggtacgtggacggcgtggaagtgcacaatgccaagaccaagcctagagaggaacagtacaacagcacctacagagtggtgtccgtgctgaccgtgctgcaccaggattggctgaacggcaaagagtacaagtgcaaggtgtccaacaaggccctgcctctgcctgaggaaaagaccatcagcaaggccaagggccagcctagggaaccccaggtttacacactgcctccaagccgcgaggaaatgaccaagaaccaggtgtccctgacctgcctcgtgaagggcttctacccttccgatatcgccgtggaatgggagagcaatggccagcctgagaacaactacaagacaacccctcctgtgctggacagcgacggctcattcttcctgtacagcaagctgaccgtggacaagtccagatggcagcagggcaacgtgttcagctgtagcgtgctgcacgaagccctgcacagccactacacccagaaaagcctgtctctgagccccggcaaatgataa

SEQ ID NO: 797 - RNA, 1653 nt, synthetic construct
  source 1..1653: mol_type = other RNA
atggattggatctggcgcatcctgtttctcgtgggagctgccacaggcgcccacagcgattttgtgctgacacagtctccccacagcctgagcgttacacctggcgagtctgccagcatcagctgcaagtctagccactctctgatccacggcgaccggaacaactacctggcttggtacgtgcagaagcccggcagatctcctcagctgctgatctacctggccagcagcagagcttctggcgtgcccgatagattttctggcagcggcagcgacaaggacttcaccctgaagatctccagagtggaaaccgaggacgtgggcacctactactgtatgcagggcagagagagcccctggacatttggccagggcaccaaggtggacatcaaaggcggcggaggaagcggaggcggaggttctggtggtggtggctctggtggcggaggctcaggcggtggcggatctcaagttcatctgacacagagcggccctgaagtgcggaagcctggcacaagcgtgaaggtgtcctgtaaagcccctggcaacaccctgaaaacctacgacctgcactgggtccgatctgtgcctggacagggactgcaatggatgggctggattagccacgagggcgacaagaaagtgatcgtggaacggttcaaggccaaagtgaccatcgactgggacagaagcaccaacaccgcctacctgcagctgagcggactgacatctggcgataccgccgtgtactactgtgccaagggcagcaagcaccggctgagagattacgccctgtacgacgatgacggcgccctgaattgggccgtcgatgtggactacctgagcaacctggaattctggggccagggaacagccgtgacagtgtcttccggcggaggtggaagtggtggcggcggatctggcggcggtgggtccggaggtggtggatctgaacctaagagcagcgacaagacccacacctgtcctccatgtcctgctccagaactgctggccggaccttccgtgttcctgtttcctccaaagcctaaggacaccctgatgatcagcagaacccctgaagtgacctgcgtggtggtggatgtgtctcacgaggaccctgaagtgaagttcaattggtacgtggacggcgtggaagtgcacaacgccaagaccaagcctagagaggaacagtacaacagcacctacagagtggtgtccgtgctgaccgtgctgcaccaggattggctgaacggcaaagagtacaagtgcaaggtgtccaacaaggccctgcctgcccctgaggaaaagaccatcagcaaggccaagggccagcctagggaaccccaggtttacacactgcctccaagccgcgaggaaatgaccaagaaccaggtgtccctgacctgcctcgtgaagggcttctacccttccgatatcgccgtggaatgggagagcaatggccagcctgagaacaactacaagacaacccctcctgtgctggacagcgacggctcattcttcctgtacagcaagctgaccgtggacaagtccagatggcagcagggcaacgtgttcagctgtagcgtgctgcacgaagccctgcacagccactacacccagaaaagcctgtctctgagccccggcaaatgataa

SEQ ID NO: 798 - RNA, 1653 nt, synthetic construct
  source 1..1653: mol_type = other RNA
atggattggatctggcgcatcctgtttctcgtgggagctgccacaggcgcccacagcgattttgtgctgacacagtctccccacagcctgagcgttacacctggcgagtctgccagcatcagctgcaagtctagccactctctgatccacggcgaccggaacaactacctggcttggtacgtgcagaagcccggcagatctcctcagctgctgatctacctggccagcagcagagcttctggcgtgcccgatagattttctggcagcggcagcgacaaggacttcaccctgaagatctccagagtggaaaccgaggacgtgggcacctactactgtatgcagggcagagagagcccctggacatttggccagggcaccaaggtggacatcaaaggcggcggaggaagcggaggcggaggttctggtggtggtggctctggtggcggaggctcaggcggtggcggatctcaagttcatctgacacagagcggccctgaagtgcggaagcctggcacaagcgtgaaggtgtcctgtaaagcccctggcaacaccctgaaaacctacgacctgcactgggtccgatctgtgcctggacagggactgcaatggatgggctggattagccacgagggcgacaagaaagtgatcgtggaacggttcaaggccaaagtgaccatcgactgggacagaagcaccaacaccgcctacctgcagctgagcggactgacatctggcgataccgccgtgtactactgtgccaagggcagcaagcaccggctgagagattacgccctgtacgacgatgacggcgccctgaattgggccgtcgatgtggactacctgagcaacctggaattctggggccagggaacagccgtgacagtgtcttccggcggaggtggaagtggtggcggcggatctggcggcggtgggtccggaggtggtggatctgaacctaagagcagcgacaagacccacacctgtcctccatgtcctgctccagaactgctggccggaccttccgtgttcctgtttcctccaaagcctaaggacaccctgatgatcagcagaacccctgaagtgacctgcgtggtggtggatgtgtctcacgaggaccctgaagtgaagttcaattggtacgtggacggcgtggaagtgcacaacgccaagaccaagcctagagaggaacagtacaacagcacctacagagtggtgtccgtgctgaccgtgctgcaccaggattggctgaacggcaaagagtacaagtgcaaggtgtccaacaaggccctgcctgcccctatcgaaaagaccatcagcaaggccaagggccagcctagggaaccccaggtttacacactgcctccaagccgcgaggaaatgaccaagaaccaggtgtccctgacctgcctcgtgaagggcttctacccttccgatatcgccgtggaatgggagagcaatggccagcctgagaacaactacaagacaacccctcctgtgctggacagcgacggctcattcttcctgtacagcaagctgaccgtggacaagtccagatggcagcagggcaacgtgttcagctgtagcgtgctgcacgaagccctgcacagccactacacccagaaaagcctgtctctgagccccggcaaatgataa

SEQ ID NO: 799 - RNA, 1653 nt, synthetic construct
  source 1..1653: mol_type = other RNA
atggattggatctggcgcatcctgtttctcgtgggagctgccacaggcgcccacagcgattttgtgctgacacagtctccccacagcctgagcgttacacctggcgagtctgccagcatcagctgcaagtctagccactctctgatccacggcgaccggaacaactacctggcttggtacgtgcagaagcccggcagatctcctcagctgctgatctacctggccagcagcagagcttctggcgtgcccgatagattttctggcagcggcagcgacaaggacttcaccctgaagatctccagagtggaaaccgaggacgtgggcacctactactgtatgcagggcagagagagcccctggacatttggccagggcaccaaggtggacatcaaaggcggcggaggaagcggaggcggaggttctggtggtggtggctctggtggcggaggctcaggcggtggcggatctcaagttcatctgacacagagcggccctgaagtgcggaagcctggcacaagcgtgaaggtgtcctgtaaagcccctggcaacaccctgaaaacctacgacctgcactgggtccgatctgtgcctggacagggactgcaatggatgggctggattagccacgagggcgacaagaaagtgatcgtggaacggttcaaggccaaagtgaccatcgactgggacagaagcaccaacaccgcctacctgcagctgagcggactgacatctggcgataccgccgtgtactactgtgccaagggcagcaagcaccggctgagagattacgccctgtacgacgatgacggcgccctgaattgggccgtcgatgtggactacctgagcaacctggaattctggggccagggaacagccgtgacagtgtcttccggcggaggtggaagtggtggcggcggatctggcggcggtgggtccggaggtggtggatctgaacctaagagcagcgacaagacccacacctgtcctccatgtcctgctccagaactgctgggcggaccttccgtgttcctgtttcctccaaagcctaaggacaccctgatgatcagcagaacccctgaagtgacctgcgtggtggtggatgtgtctcacgaggaccctgaagtgaagttcaattggtacgtggacggcgtggaagtgcacaacgccaagaccaagcctagagaggaacagtacaacagcacctacagagtggtgtccgtgctgaccgtgctgcaccaggattggctgaacggcaaagagtacaagtgcaaggtgtccaacaaggccctgcctgcccctgaggaaaagaccatcagcaaggccaagggccagcctagggaaccccaggtttacacactgcctccaagccgcgaggaaatgaccaagaaccaggtgtccctgacctgcctcgtgaagggcttctacccttccgatatcgccgtggaatgggagagcaatggccagcctgagaacaactacaagacaacccctcctgtgctggacagcgacggctcattcttcctgtacagcaagctgaccgtggacaagtccagatggcagcagggcaacgtgttcagctgtagcgtgctgcacgaagccctgcacagccactacacccagaaaagcctgtctctgagccccggcaaatgataa

SEQ ID NO: 800 - RNA, 1653 nt, synthetic construct
  source 1..1653: mol_type = other RNA
atggattggatctggcgcatcctgtttctcgtgggagctgccacaggcgcccacagcgattttgtgctgacacagtctccccacagcctgagcgttacacctggcgagtctgccagcatcagctgcaagtctagccactctctgatccacggcgaccggaacaactacctggcttggtacgtgcagaagcccggcagatctcctcagctgctgatctacctggccagcagcagagcttctggcgtgcccgatagattttctggcagcggcagcgacaaggacttcaccctgaagatctccagagtggaaaccgaggacgtgggcacctactactgtatgcagggcagagagagcccctggacatttggccagggcaccaaggtggacatcaaaggcggcggaggaagcggaggcggaggttctggtggtggtggctctggtggcggaggctcaggcggtggcggatctcaagttcatctgacacagagcggccctgaagtgcggaagcctggcacaagcgtgaaggtgtcctgtaaagcccctggcaacaccctgaaaacctacgacctgcactgggtccgatctgtgcctggacagggactgcaatggatgggctggattagccacgagggcgacaagaaagtgatcgtggaacggttcaaggccaaagtgaccatcgactgggacagaagcaccaacaccgcctacctgcagctgagcggactgacatctggcgataccgccgtgtactactgtgccaagggcagcaagcaccggctgagagattacgccctgtacgacgatgacggcgccctgaattgggccgtcgatgtggactacctgagcaacctggaattctggggccagggaacagccgtgacagtgtcttccggcggaggtggaagtggtggcggcggatctggcggcggtgggtccggaggtggtggatctgaacctaagagcagcgacaagacccacacctgtcctccatgtcctgctccagaactgctcggcggaccttccgtgttcctgtttcctccaaagcctaaggacaccctgatgatcagcagaacccctgaagtgacctgcgtggtggtggatgtgtctcacgaggaccccgaagtgaagttcaattggtacgtggacggcgtggaagtgcacaacgccaagaccaagcctagagaggaacagtacaacagcacctacagagtggtgtccgtgctgacagtgctgcaccaggattggctgaacggcaaagagtacaagtgcaaggtgtccaacaaggccctgcctgctcctatcgagaaaaccatcagcaaggccaagggccagcctagggaaccccaagtctgtacactgcctcctagccgcgaggaaatgaccaagaaccaggtgtccctgagctgcgccgtgaagggcttttacccttccgatatcgccgtggaatgggagagcaatggccagcctgagaacaactacaagacaacccctcctgtgctggacagcgacggctcattcttcctggtgtccaagctgacagtggacaagagcagatggcagcagggcaacgtgttcagctgctctgtgctgcacgaagccctgcacagccactacacccagaagtccctgtctctgagccccggcaagtgataa

SEQ ID NO: 801 - RNA, 1653 nt, synthetic construct
  source 1..1653: mol_type = other RNA
atggattggatctggcgcatcctgtttctcgtgggagctgccacaggcgcccacagcgattttgtgctgacacagtctccccacagcctgagcgttacacctggcgagtctgccagcatcagctgcaagtctagccactctctgatccacggcgaccggaacaactacctggcttggtacgtgcagaagcccggcagatctcctcagctgctgatctacctggccagcagcagagcttctggcgtgcccgatagattttctggcagcggcagcgacaaggacttcaccctgaagatctccagagtggaaaccgaggacgtgggcacctactactgtatgcagggcagagagagcccctggacatttggccagggcaccaaggtggacatcaaaggcggcggaggaagcggaggcggaggttctggtggtggtggctctggtggcggaggctcaggcggtggcggatctcaagttcatctgacacagagcggccctgaagtgcggaagcctggcacaagcgtgaaggtgtcctgtaaagcccctggcaacaccctgaaaacctacgacctgcactgggtccgatctgtgcctggacagggactgcaatggatgggctggattagccacgagggcgacaagaaagtgatcgtggaacggttcaaggccaaagtgaccatcgactgggacagaagcaccaacaccgcctacctgcagctgagcggactgacatctggcgataccgccgtgtactactgtgccaagggcagcaagcaccggctgagagattacgccctgtacgacgatgacggcgccctgaattgggccgtcgatgtggactacctgagcaacctggaattctggggccagggaacagccgtgacagtgtcttccggcggaggtggaagtggtggcggcggatctggcggcggtgggtccggaggtggtggatctgaacctaagagcagcgacaagacccacacctgtcctccatgtcctgctccagaactgctggccggaccttccgtgttcctgtttcctccaaagcctaaggacaccctgatgatcagcagaacccctgaagtgacctgcgtggtggtggatgtgtctcacgaggaccccgaagtgaagttcaattggtacgtggacggcgtggaagtgcacaatgccaagaccaagcctagagaggaacagtacaacagcacctacagagtggtgtccgtgctgaccgtgctgcaccaggattggctgaacggcaaagagtacaagtgcaaggtgtccaacaaggccctgcctctgcctgaggaaaagaccatcagcaaggccaagggccagcctagggaaccccaagtctgtacactgcctcctagccgcgaggaaatgaccaagaaccaggtgtccctgagctgcgccgtgaagggcttttacccttccgatatcgccgtggaatgggagagcaatggccagcctgagaacaactacaagacaacccctcctgtgctggacagcgacggctcattcttcctggtgtccaagctgacagtggacaagagcagatggcagcagggcaacgtgttcagctgctctgtgctgcacgaagccctgcacagccactacacccagaagtccctgtctctgagccccggcaagtgataa

SEQ ID NO: 802 - RNA, 1653 nt, synthetic construct
  source 1..1653: mol_type = other RNA
atggattggatctggcgcatcctgtttctcgtgggagctgccacaggcgcccacagcgattttgtgctgacacagtctccccacagcctgagcgttacacctggcgagtctgccagcatcagctgcaagtctagccactctctgatccacggcgaccggaacaactacctggcttggtacgtgcagaagcccggcagatctcctcagctgctgatctacctggccagcagcagagcttctggcgtgcccgatagattttctggcagcggcagcgacaaggacttcaccctgaagatctccagagtggaaaccgaggacgtgggcacctactactgtatgcagggcagagagagcccctggacatttggccagggcaccaaggtggacatcaaaggcggcggaggaagcggaggcggaggttctggtggtggtggctctggtggcggaggctcaggcggtggcggatctcaagttcatctgacacagagcggccctgaagtgcggaagcctggcacaagcgtgaaggtgtcctgtaaagcccctggcaacaccctgaaaacctacgacctgcactgggtccgatctgtgcctggacagggactgcaatggatgggctggattagccacgagggcgacaagaaagtgatcgtggaacggttcaaggccaaagtgaccatcgactgggacagaagcaccaacaccgcctacctgcagctgagcggactgacatctggcgataccgccgtgtactactgtgccaagggcagcaagcaccggctgagagattacgccctgtacgacgatgacggcgccctgaattgggccgtcgatgtggactacctgagcaacctggaattctggggccagggaacagccgtgacagtgtcttccggcggaggtggaagtggtggcggcggatctggcggcggtgggtccggaggtggtggatctgaacctaagagcagcgacaagacccacacctgtcctccatgtcctgctccagaactgctggccggaccttccgtgttcctgtttcctccaaagcctaaggacaccctgatgatcagcagaacccctgaagtgacctgcgtggtggtggatgtgtctcacgaggaccctgaagtgaagttcaattggtacgtggacggcgtggaagtgcacaacgccaagaccaagcctagagaggaacagtacaacagcacctacagagtggtgtccgtgctgaccgtgctgcaccaggattggctgaacggcaaagagtacaagtgcaaggtgtccaacaaggccctgcctgcccctgaggaaaagaccatcagcaaggccaagggccagcctagggaaccccaagtctgtacactgcctcctagccgcgaggaaatgaccaagaaccaggtgtccctgagctgcgccgtgaagggcttttacccttccgatatcgccgtggaatgggagagcaatggccagcctgagaacaactacaagacaacccctcctgtgctggacagcgacggctcattcttcctggtgtccaagctgacagtggacaagagcagatggcagcagggcaacgtgttcagctgctctgtgctgcacgaagccctgcacagccactacacccagaagtccctgtctctgagccccggcaagtgataa

SEQ ID NO: 803 - RNA, 1653 nt, synthetic construct
  source 1..1653: mol_type = other RNA
atggattggatctggcgcatcctgtttctcgtgggagctgccacaggcgcccacagcgattttgtgctgacacagtctccccacagcctgagcgttacacctggcgagtctgccagcatcagctgcaagtctagccactctctgatccacggcgaccggaacaactacctggcttggtacgtgcagaagcccggcagatctcctcagctgctgatctacctggccagcagcagagcttctggcgtgcccgatagattttctggcagcggcagcgacaaggacttcaccctgaagatctccagagtggaaaccgaggacgtgggcacctactactgtatgcagggcagagagagcccctggacatttggccagggcaccaaggtggacatcaaaggcggcggaggaagcggaggcggaggttctggtggtggtggctctggtggcggaggctcaggcggtggcggatctcaagttcatctgacacagagcggccctgaagtgcggaagcctggcacaagcgtgaaggtgtcctgtaaagcccctggcaacaccctgaaaacctacgacctgcactgggtccgatctgtgcctggacagggactgcaatggatgggctggattagccacgagggcgacaagaaagtgatcgtggaacggttcaaggccaaagtgaccatcgactgggacagaagcaccaacaccgcctacctgcagctgagcggactgacatctggcgataccgccgtgtactactgtgccaagggcagcaagcaccggctgagagattacgccctgtacgacgatgacggcgccctgaattgggccgtcgatgtggactacctgagcaacctggaattctggggccagggaacagccgtgacagtgtcttccggcggaggtggaagtggtggcggcggatctggcggcggtgggtccggaggtggtggatctgaacctaagagcagcgacaagacccacacctgtcctccatgtcctgctccagaactgctggccggaccttccgtgttcctgtttcctccaaagcctaaggacaccctgatgatcagcagaacccctgaagtgacctgcgtggtggtggatgtgtctcacgaggaccctgaagtgaagttcaattggtacgtggacggcgtggaagtgcacaacgccaagaccaagcctagagaggaacagtacaacagcacctacagagtggtgtccgtgctgaccgtgctgcaccaggattggctgaacggcaaagagtacaagtgcaaggtgtccaacaaggccctgcctgcccctatcgaaaagaccatcagcaaggccaagggccagcctagggaaccccaagtctgtacactgcctcctagccgcgaggaaatgaccaagaaccaggtgtccctgagctgcgccgtgaagggcttttacccttccgatatcgccgtggaatgggagagcaatggccagcctgagaacaactacaagacaacccctcctgtgctggacagcgacggctcattcttcctggtgtccaagctgacagtggacaagagcagatggcagcagggcaacgtgttcagctgctctgtgctgcacgaagccctgcacagccactacacccagaagtccctgtctctgagccccggcaagtgataa

SEQ ID NO: 804 - RNA, 1653 nt, synthetic construct
  source 1..1653: mol_type = other RNA
atggattggatctggcgcatcctgtttctcgtgggagctgccacaggcgcccacagcgattttgtgctgacacagtctccccacagcctgagcgttacacctggcgagtctgccagcatcagctgcaagtctagccactctctgatccacggcgaccggaacaactacctggcttggtacgtgcagaagcccggcagatctcctcagctgctgatctacctggccagcagcagagcttctggcgtgcccgatagattttctggcagcggcagcgacaaggacttcaccctgaagatctccagagtggaaaccgaggacgtgggcacctactactgtatgcagggcagagagagcccctggacatttggccagggcaccaaggtggacatcaaaggcggcggaggaagcggaggcggaggttctggtggtggtggctctggtggcggaggctcaggcggtggcggatctcaagttcatctgacacagagcggccctgaagtgcggaagcctggcacaagcgtgaaggtgtcctgtaaagcccctggcaacaccctgaaaacctacgacctgcactgggtccgatctgtgcctggacagggactgcaatggatgggctggattagccacgagggcgacaagaaagtgatcgtggaacggttcaaggccaaagtgaccatcgactgggacagaagcaccaacaccgcctacctgcagctgagcggactgacatctggcgataccgccgtgtactactgtgccaagggcagcaagcaccggctgagagattacgccctgtacgacgatgacggcgccctgaattgggccgtcgatgtggactacctgagcaacctggaattctggggccagggaacagccgtgacagtgtcttccggcggaggtggaagtggtggcggcggatctggcggcggtgggtccggaggtggtggatctgaacctaagagcagcgacaagacccacacctgtcctccatgtcctgctccagaactgctgggcggaccttccgtgttcctgtttcctccaaagcctaaggacaccctgatgatcagcagaacccctgaagtgacctgcgtggtggtggatgtgtctcacgaggaccctgaagtgaagttcaattggtacgtggacggcgtggaagtgcacaacgccaagaccaagcctagagaggaacagtacaacagcacctacagagtggtgtccgtgctgaccgtgctgcaccaggattggctgaacggcaaagagtacaagtgcaaggtgtccaacaaggccctgcctgcccctgaggaaaagaccatcagcaaggccaagggccagcctagggaaccccaagtctgtacactgcctcctagccgcgaggaaatgaccaagaaccaggtgtccctgagctgcgccgtgaagggcttttacccttccgatatcgccgtggaatgggagagcaatggccagcctgagaacaactacaagacaacccctcctgtgctggacagcgacggctcattcttcctggtgtccaagctgacagtggacaagagcagatggcagcagggcaacgtgttcagctgctctgtgctgcacgaagccctgcacagccactacacccagaagtccctgtctctgagccccggcaagtgataa

SEQ ID NO: 805 - RNA, 1653 nt, synthetic construct
  source 1..1653: mol_type = other RNA
atggattggatctggcgcatcctgtttctcgtgggagctgccacaggcgcccacagcgattttgtgctgacacagtctccccacagcctgagcgttacacctggcgagtctgccagcatcagctgcaagtctagccactctctgatccacggcgaccggaacaactacctggcttggtacgtgcagaagcccggcagatctcctcagctgctgatctacctggccagcagcagagcttctggcgtgcccgatagattttctggcagcggcagcgacaaggacttcaccctgaagatctccagagtggaaaccgaggacgtgggcacctactactgtatgcagggcagagagagcccctggacatttggccagggcaccaaggtggacatcaaaggcggcggaggaagcggaggcggaggttctggtggtggtggctctggtggcggaggctcaggcggtggcggatctcaagttcatctgacacagagcggccctgaagtgcggaagcctggcacaagcgtgaaggtgtcctgtaaagcccctggcaacaccctgaaaacctacgacctgcactgggtccgatctgtgcctggacagggactgcaatggatgggctggattagccacgagggcgacaagaaagtgatcgtggaacggttcaaggccaaagtgaccatcgactgggacagaagcaccaacaccgcctacctgcagctgagcggactgacatctggcgataccgccgtgtactactgtgccaagggcagcaagcaccggctgagagattacgccctgtacgacgatgacggcgccctgaattgggccgtcgatgtggactacctgagcaacctggaattctggggccagggaacagccgtgacagtgtcttccggcggaggtggaagtggtggcggcggatctggcggcggtgggtccggaggtggtggatctgaacctaagagcagcgacaagacccacacctgtcctccatgtcctgctccagaactgctcggcggaccttccgtgttcctgtttcctccaaagcctaaggacaccctgatgatcagcagaacccctgaagtgacctgcgtggtggtggatgtgtctcacgaggaccccgaagtgaagttcaattggtacgtggacggcgtggaagtgcacaacgccaagaccaagcctagagaggaacagtacaacagcacctacagagtggtgtccgtgctgacagtgctgcaccaggattggctgaacggcaaagagtacaagtgcaaggtgtccaacaaggccctgcctgctcctatcgagaaaaccatcagcaaggccaagggccagcctagggaaccccaggtttacaccctgcctccatgccgcgaggaaatgaccaagaaccaggtgtccctgtggtgcctcgtgaagggcttctacccttccgatatcgccgtggaatgggagagcaatggccagcctgagaacaactacaagacaacccctcctgtgctggacagcgacggctcattcttcctgtacagcaagctgaccgtggacaagtccagatggcagcagggcaacgtgttcagctgtagcgtgctgcacgaagccctgcacagccactacacccagaagtccctgtctctgagccccggcaagtgataa

SEQ ID NO: 806 - RNA, 1653 nt, synthetic construct
  source 1..1653: mol_type = other RNA
atggattggatctggcgcatcctgtttctcgtgggagctgccacaggcgcccacagcgattttgtgctgacacagtctccccacagcctgagcgttacacctggcgagtctgccagcatcagctgcaagtctagccactctctgatccacggcgaccggaacaactacctggcttggtacgtgcagaagcccggcagatctcctcagctgctgatctacctggccagcagcagagcttctggcgtgcccgatagattttctggcagcggcagcgacaaggacttcaccctgaagatctccagagtggaaaccgaggacgtgggcacctactactgtatgcagggcagagagagcccctggacatttggccagggcaccaaggtggacatcaaaggcggcggaggaagcggaggcggaggttctggtggtggtggctctggtggcggaggctcaggcggtggcggatctcaagttcatctgacacagagcggccctgaagtgcggaagcctggcacaagcgtgaaggtgtcctgtaaagcccctggcaacaccctgaaaacctacgacctgcactgggtccgatctgtgcctggacagggactgcaatggatgggctggattagccacgagggcgacaagaaagtgatcgtggaacggttcaaggccaaagtgaccatcgactgggacagaagcaccaacaccgcctacctgcagctgagcggactgacatctggcgataccgccgtgtactactgtgccaagggcagcaagcaccggctgagagattacgccctgtacgacgatgacggcgccctgaattgggccgtcgatgtggactacctgagcaacctggaattctggggccagggaacagccgtgacagtgtcttccggcggaggtggaagtggtggcggcggatctggcggcggtgggtccggaggtggtggatctgaacctaagagcagcgacaagacccacacctgtcctccatgtcctgctccagaactgctggccggaccttccgtgttcctgtttcctccaaagcctaaggacaccctgatgatcagcagaacccctgaagtgacctgcgtggtggtggatgtgtctcacgaggaccccgaagtgaagttcaattggtacgtggacggcgtggaagtgcacaatgccaagaccaagcctagagaggaacagtacaacagcacctacagagtggtgtccgtgctgaccgtgctgcaccaggattggctgaacggcaaagagtacaagtgcaaggtgtccaacaaggccctgcctctgcctgaggaaaagaccatcagcaaggccaagggccagcctagggaaccccaggtttacaccctgcctccatgccgcgaggaaatgaccaagaaccaggtgtccctgtggtgcctcgtgaagggcttctacccttccgatatcgccgtggaatgggagagcaatggccagcctgagaacaactacaagacaacccctcctgtgctggacagcgacggctcattcttcctgtacagcaagctgaccgtggacaagtccagatggcagcagggcaacgtgttcagctgtagcgtgctgcacgaagccctgcacagccactacacccagaagtccctgtctctgagccccggcaagtgataa

SEQ ID NO: 807 - RNA, 1653 nt, synthetic construct
  source 1..1653: mol_type = other RNA
atggattggatctggcgcatcctgtttctcgtgggagctgccacaggcgcccacagcgattttgtgctgacacagtctccccacagcctgagcgttacacctggcgagtctgccagcatcagctgcaagtctagccactctctgatccacggcgaccggaacaactacctggcttggtacgtgcagaagcccggcagatctcctcagctgctgatctacctggccagcagcagagcttctggcgtgcccgatagattttctggcagcggcagcgacaaggacttcaccctgaagatctccagagtggaaaccgaggacgtgggcacctactactgtatgcagggcagagagagcccctggacatttggccagggcaccaaggtggacatcaaaggcggcggaggaagcggaggcggaggttctggtggtggtggctctggtggcggaggctcaggcggtggcggatctcaagttcatctgacacagagcggccctgaagtgcggaagcctggcacaagcgtgaaggtgtcctgtaaagcccctggcaacaccctgaaaacctacgacctgcactgggtccgatctgtgcctggacagggactgcaatggatgggctggattagccacgagggcgacaagaaagtgatcgtggaacggttcaaggccaaagtgaccatcgactgggacagaagcaccaacaccgcctacctgcagctgagcggactgacatctggcgataccgccgtgtactactgtgccaagggcagcaagcaccggctgagagattacgccctgtacgacgatgacggcgccctgaattgggccgtcgatgtggactacctgagcaacctggaattctggggccagggaacagccgtgacagtgtcttccggcggaggtggaagtggtggcggcggatctggcggcggtgggtccggaggtggtggatctgaacctaagagcagcgacaagacccacacctgtcctccatgtcctgctccagaactgctggccggaccttccgtgttcctgtttcctccaaagcctaaggacaccctgatgatcagcagaacccctgaagtgacctgcgtggtggtggatgtgtctcacgaggaccctgaagtgaagttcaattggtacgtggacggcgtggaagtgcacaacgccaagaccaagcctagagaggaacagtacaacagcacctacagagtggtgtccgtgctgaccgtgctgcaccaggattggctgaacggcaaagagtacaagtgcaaggtgtccaacaaggccctgcctgcccctgaggaaaagaccatcagcaaggccaagggccagcctagggaaccccaggtttacaccctgcctccatgccgcgaggaaatgaccaagaaccaggtgtccctgtggtgcctcgtgaagggcttctacccttccgatatcgccgtggaatgggagagcaatggccagcctgagaacaactacaagacaacccctcctgtgctggacagcgacggctcattcttcctgtacagcaagctgaccgtggacaagtccagatggcagcagggcaacgtgttcagctgtagcgtgctgcacgaagccctgcacagccactacacccagaagtccctgtctctgagccccggcaagtgataa

SEQ ID NO: 808 - RNA, 1653 nt, synthetic construct
  source 1..1653: mol_type = other RNA
atggattggatctggcgcatcctgtttctcgtgggagctgccacaggcgcccacagcgattttgtgctgacacagtctccccacagcctgagcgttacacctggcgagtctgccagcatcagctgcaagtctagccactctctgatccacggcgaccggaacaactacctggcttggtacgtgcagaagcccggcagatctcctcagctgctgatctacctggccagcagcagagcttctggcgtgcccgatagattttctggcagcggcagcgacaaggacttcaccctgaagatctccagagtggaaaccgaggacgtgggcacctactactgtatgcagggcagagagagcccctggacatttggccagggcaccaaggtggacatcaaaggcggcggaggaagcggaggcggaggttctggtggtggtggctctggtggcggaggctcaggcggtggcggatctcaagttcatctgacacagagcggccctgaagtgcggaagcctggcacaagcgtgaaggtgtcctgtaaagcccctggcaacaccctgaaaacctacgacctgcactgggtccgatctgtgcctggacagggactgcaatggatgggctggattagccacgagggcgacaagaaagtgatcgtggaacggttcaaggccaaagtgaccatcgactgggacagaagcaccaacaccgcctacctgcagctgagcggactgacatctggcgataccgccgtgtactactgtgccaagggcagcaagcaccggctgagagattacgccctgtacgacgatgacggcgccctgaattgggccgtcgatgtggactacctgagcaacctggaattctggggccagggaacagccgtgacagtgtcttccggcggaggtggaagtggtggcggcggatctggcggcggtgggtccggaggtggtggatctgaacctaagagcagcgacaagacccacacctgtcctccatgtcctgctccagaactgctggccggaccttccgtgttcctgtttcctccaaagcctaaggacaccctgatgatcagcagaacccctgaagtgacctgcgtggtggtggatgtgtctcacgaggaccctgaagtgaagttcaattggtacgtggacggcgtggaagtgcacaacgccaagaccaagcctagagaggaacagtacaacagcacctacagagtggtgtccgtgctgaccgtgctgcaccaggattggctgaacggcaaagagtacaagtgcaaggtgtccaacaaggccctgcctgcccctatcgaaaagaccatcagcaaggccaagggccagcctagggaaccccaggtttacaccctgcctccatgccgcgaggaaatgaccaagaaccaggtgtccctgtggtgcctcgtgaagggcttctacccttccgatatcgccgtggaatgggagagcaatggccagcctgagaacaactacaagacaacccctcctgtgctggacagcgacggctcattcttcctgtacagcaagctgaccgtggacaagtccagatggcagcagggcaacgtgttcagctgtagcgtgctgcacgaagccctgcacagccactacacccagaagtccctgtctctgagccccggcaagtgataa

SEQ ID NO: 809 - RNA, 1653 nt, synthetic construct
  source 1..1653: mol_type = other RNA
atggattggatctggcgcatcctgtttctcgtgggagctgccacaggcgcccacagcgattttgtgctgacacagtctccccacagcctgagcgttacacctggcgagtctgccagcatcagctgcaagtctagccactctctgatccacggcgaccggaacaactacctggcttggtacgtgcagaagcccggcagatctcctcagctgctgatctacctggccagcagcagagcttctggcgtgcccgatagattttctggcagcggcagcgacaaggacttcaccctgaagatctccagagtggaaaccgaggacgtgggcacctactactgtatgcagggcagagagagcccctggacatttggccagggcaccaaggtggacatcaaaggcggcggaggaagcggaggcggaggttctggtggtggtggctctggtggcggaggctcaggcggtggcggatctcaagttcatctgacacagagcggccctgaagtgcggaagcctggcacaagcgtgaaggtgtcctgtaaagcccctggcaacaccctgaaaacctacgacctgcactgggtccgatctgtgcctggacagggactgcaatggatgggctggattagccacgagggcgacaagaaagtgatcgtggaacggttcaaggccaaagtgaccatcgactgggacagaagcaccaacaccgcctacctgcagctgagcggactgacatctggcgataccgccgtgtactactgtgccaagggcagcaagcaccggctgagagattacgccctgtacgacgatgacggcgccctgaattgggccgtcgatgtggactacctgagcaacctggaattctggggccagggaacagccgtgacagtgtcttccggcggaggtggaagtggtggcggcggatctggcggcggtgggtccggaggtggtggatctgaacctaagagcagcgacaagacccacacctgtcctccatgtcctgctccagaactgctgggcggaccttccgtgttcctgtttcctccaaagcctaaggacaccctgatgatcagcagaacccctgaagtgacctgcgtggtggtggatgtgtctcacgaggaccctgaagtgaagttcaattggtacgtggacggcgtggaagtgcacaacgccaagaccaagcctagagaggaacagtacaacagcacctacagagtggtgtccgtgctgaccgtgctgcaccaggattggctgaacggcaaagagtacaagtgcaaggtgtccaacaaggccctgcctgcccctgaggaaaagaccatcagcaaggccaagggccagcctagggaaccccaggtttacaccctgcctccatgccgcgaggaaatgaccaagaaccaggtgtccctgtggtgcctcgtgaagggcttctacccttccgatatcgccgtggaatgggagagcaatggccagcctgagaacaactacaagacaacccctcctgtgctggacagcgacggctcattcttcctgtacagcaagctgaccgtggacaagtccagatggcagcagggcaacgtgttcagctgtagcgtgctgcacgaagccctgcacagccactacacccagaagtccctgtctctgagccccggcaagtgataa

SEQ ID NO: 810 - RNA, 1653 nt, synthetic construct; identical to SEQ ID NO: 794
  source 1..1653: mol_type = other RNA

SEQ ID NO: 811 - RNA, 1653 nt, synthetic construct; identical to SEQ ID NO: 795
  source 1..1653: mol_type = other RNA

SEQ ID NO: 812 - RNA, 1653 nt, synthetic construct; identical to SEQ ID NO: 796
  source 1..1653: mol_type = other RNA

SEQ ID NO: 813 - RNA, 1653 nt, synthetic construct; identical to SEQ ID NO: 797
  source 1..1653: mol_type = other RNA

SEQ ID NO: 814 - RNA, 1653 nt, synthetic construct; identical to SEQ ID NO: 798
  source 1..1653: mol_type = other RNA

SEQ ID NO: 815 - RNA, 1653 nt, synthetic construct; identical to SEQ ID NO: 799
  source 1..1653: mol_type = other RNA

SEQ ID NO: 816 - RNA, 1653 nt, synthetic construct; identical to SEQ ID NO: 800
  source 1..1653: mol_type = other RNA

SEQ ID NO: 817 - RNA, 1653 nt, synthetic construct; identical to SEQ ID NO: 801
  source 1..1653: mol_type = other RNA

SEQ ID NO: 818 - RNA, 1653 nt, synthetic construct; identical to SEQ ID NO: 802
  source 1..1653: mol_type = other RNA

SEQ ID NO: 819 - RNA, 1653 nt, synthetic construct; identical to SEQ ID NO: 803
  source 1..1653: mol_type = other RNA

SEQ ID NO: 820 - RNA, 1653 nt, synthetic construct; identical to SEQ ID NO: 804
  source 1..1653: mol_type = other RNA

SEQ ID NO: 821 - RNA, 1653 nt, synthetic construct; identical to SEQ ID NO: 805
  source 1..1653: mol_type = other RNA

SEQ ID NO: 822 - RNA, 1653 nt, synthetic construct; identical to SEQ ID NO: 806
  source 1..1653: mol_type = other RNA

SEQ ID NO: 823 - RNA, 1653 nt, synthetic construct; identical to SEQ ID NO: 807
  source 1..1653: mol_type = other RNA

SEQ ID NO: 824 - RNA, 1653 nt, synthetic construct; identical to SEQ ID NO: 808
  source 1..1653: mol_type = other RNA

SEQ ID NO: 825 - RNA, 1653 nt, synthetic construct; identical to SEQ ID NO: 809
  source 1..1653: mol_type = other RNA

SEQ ID NO: 826 - RNA, 1653 nt, synthetic construct
  source 1..1653: mol_type = other RNA
atggattggatctggcgcatcctgtttctcgtgggagctgccacaggcgcccacagcgattttgtgctgacacagtctccccacagcctgagcgttacacctggcgagtctgccagcatcagctgcaagtctagccactctctgatccacggcgaccggaacaactacctggcttggtacgtgcagaagcccggcagatctcctcagctgctgatctacctggccagcagcagagcttctggcgtgcccgatagattttctggcagcggcagcgacaaggacttcaccctgaagatctccagagtggaaaccgaggacgtgggcacctactactgtatgcagggcagagagagcccctggacatttggccagggcaccaaggtggacatcaaaggcggcggaggaagcggaggcggaggttctggtggtggtggctctggtggcggaggctcaggcggtggcggatctcaagttcatctgacacagagcggccctgaagtgcggaagcctggcacaagcgtgaaggtgtcctgtaaagcccctggcaacaccctgaaaacctacgacctgcactgggtccgatctgtgcctggacagggactgcaatggatgggctggattagccacgagggcgacaagaaagtgatcgtggaacggttcaaggccaaagtgaccatcgactgggacagaagcaccaacaccgcctacctgcagctgagcggactgacatctggcgataccgccgtgtactactgtgccaagggcagcaagcaccggctgagagattacgccctgtacgacgatgacggcgccctgaattgggccgtcgatgtggactacctgagcaacctggaattctggggccagggaacagccgtgacagtgtcttccggcggaggtggaagtggtggcggcggatctggcggcggtgggtccggaggtggtggatctgaacctaagagcagcgacaagacccacacctgtcctccatgtcctgctccagaactgctcggcggaccttccgtgttcctgtttcctccaaagcctaaggacaccctgatgatcagcagaacccctgaagtgacctgcgtggtggtggatgtgtctcacgaggaccccgaagtgaagttcaattggtacgtggacggcgtggaagtgcacaacgccaagaccaagcctagagaggaacagtacaacagcacctacagagtggtgtccgtgctgacagtgctgcaccaggattggctgaacggcaaagagtacaagtgcaaggtgtccaacaaggccctgcctgctcctatcgagaaaaccatcagcaaggccaagggccagcctagggaaccccaggtttacacactgcctccaagccgcgacgaactgaccaagaaccaggtgtccctgacctgcctcgtgaagggcttctacccttccgatatcgccgtggaatgggagagcaatggccagcctgagaacaactacaagacaacccctcctgtgctggacagcgacggctcattcttcctgtacagcaagctgactgtggataagtcccggtggcagcagggcaacgtgttcagctgttctgtgatgcacgaagccctgcacaaccactacacccagaaaagcctgtctctgagccccggcaagtgataa

SEQ ID NO: 827 - RNA, 1653 nt, synthetic construct
  source 1..1653: mol_type = other RNA
atggattggatctggcgcatcctgtttctcgtgggagctgccacaggcgcccacagcgattttgtgctgacacagtctccccacagcctgagcgttacacctggcgagtctgccagcatcagctgcaagtctagccactctctgatccacggcgaccggaacaactacctggcttggtacgtgcagaagcccggcagatctcctcagctgctgatctacctggccagcagcagagcttctggcgtgcccgatagattttctggcagcggcagcgacaaggacttcaccctgaagatctccagagtggaaaccgaggacgtgggcacctactactgtatgcagggcagagagagcccctggacatttggccagggcaccaaggtggacatcaaaggcggcggaggaagcggaggcggaggttctggtggtggtggctctggtggcggaggctcaggcggtggcggatctcaagttcatctgacacagagcggccctgaagtgcggaagcctggcacaagcgtgaaggtgtcctgtaaagcccctggcaacaccctgaaaacctacgacctgcactgggtccgatctgtgcctggacagggactgcaatggatgggctggattagccacgagggcgacaagaaagtgatcgtggaacggttcaaggccaaagtgaccatcgactgggacagaagcaccaacaccgcctacctgcagctgagcggactgacatctggcgataccgccgtgtactactgtgccaagggcagcaagcaccggctgagagattacgccctgtacgacgatgacggcgccctgaattgggccgtcgatgtggactacctgagcaacctggaattctggggccagggaacagccgtgacagtgtcttccggcggaggtggaagtggtggcggcggatctggcggcggtgggtccggaggtggtggatctgaacctaagagcagcgacaagacccacacctgtcctccatgtcctgctccagaactgctcggcggaccttccgtgttcctgtttcctccaaagcctaaggacaccctgatgatcagcagaacccctgaagtgacctgcgtggtggtggatgtgtctcacgaggaccccgaagtgaagttcaattggtacgtggacggcgtggaagtgcacaacgccaagaccaagcctagagaggaacagtacaacagcacctacagagtggtgtccgtgctgacagtgctgcaccaggattggctgaacggcaaagagtacaagtgcaaggtgtccaacaaggccctgcctgctcctatcgagaaaaccatcagcaaggccaagggccagcctagggaaccccaggtttacacactgcctccaagccgcgacgaactgaccaagaaccaggtgtccctgacctgcctcgtgaagggcttctacccttccgatatcgccgtggaatgggagagcaatggccagcctgagaacaactacaagacaacccctcctgtgctggacagcgacggctcattcttcctgtacagcaagctgaccgtggacaagtccagatggcagcagggcaacgtgttcagctgtagcgtgctgcacgaagccctgcacagccactacacccagaaaagcctgtctctgagccccggcaaatgataa

SEQ ID NO: 828 - RNA, 1653 nt, synthetic construct
  source 1..1653: mol_type = other RNA
atggattggatctggcgcatcctgtttctcgtgggagctgccacaggcgcccacagcgattttgtgctgacacagtctccccacagcctgagcgttacacctggcgagtctgccagcatcagctgcaagtctagccactctctgatccacggcgaccggaacaactacctggcttggtacgtgcagaagcccggcagatctcctcagctgctgatctacctggccagcagcagagcttctggcgtgcccgatagattttctggcagcggcagcgacaaggacttcaccctgaagatctccagagtggaaaccgaggacgtgggcacctactactgtatgcagggcagagagagcccctggacatttggccagggcaccaaggtggacatcaaaggcggcggaggaagcggaggcggaggttctggtggtggtggctctggtggcggaggctcaggcggtggcggatctcaagttcatctgacacagagcggccctgaagtgcggaagcctggcacaagcgtgaaggtgtcctgtaaagcccctggcaacaccctgaaaacctacgacctgcactgggtccgatctgtgcctggacagggactgcaatggatgggctggattagccacgagggcgacaagaaagtgatcgtggaacggttcaaggccaaagtgaccatcgactgggacagaagcaccaacaccgcctacctgcagctgagcggactgacatctggcgataccgccgtgtactactgtgccaagggcagcaagcaccggctgagagattacgccctgtacgacgatgacggcgccctgaattgggccgtcgatgtggactacctgagcaacctggaattctggggccagggaacagccgtgacagtgtcttccggcggaggtggaagtggtggcggcggatctggcggcggtgggtccggaggtggtggatctgaacctaagagcagcgacaagacccacacctgtcctccatgtcctgctccagaactgctggccggaccttccgtgttcctgtttcctccaaagcctaaggacaccctgatgatcagcagaacccctgaagtgacctgcgtggtggtggatgtgtctcacgaggaccccgaagtgaagttcaattggtacgtggacggcgtggaagtgcacaatgccaagaccaagcctagagaggaacagtacaacagcacctacagagtggtgtccgtgctgaccgtgctgcaccaggattggctgaacggcaaagagtacaagtgcaaggtgtccaacaaggccctgcctctgcctgaggaaaagaccatcagcaaggccaagggccagcctagggaaccccaggtttacacactgcctccaagccgcgacgaactgaccaagaaccaggtgtccctgacctgcctcgtgaagggcttctacccttccgatatcgccgtggaatgggagagcaatggccagcctgagaacaactacaagacaacccctcctgtgctggacagcgacggctcattcttcctgtacagcaagctgaccgtggacaagtccagatggcagcagggcaacgtgttcagctgtagcgtgctgcacgaagccctgcacagccactacacccagaaaagcctgtctctgagccccggcaaatgataa

SEQ ID NO: 829 - RNA, 1653 nt, synthetic construct
  source 1..1653: mol_type = other RNA
atggattggatctggcgcatcctgtttctcgtgggagctgccacaggcgcccacagcgattttgtgctgacacagtctccccacagcctgagcgttacacctggcgagtctgccagcatcagctgcaagtctagccactctctgatccacggcgaccggaacaactacctggcttggtacgtgcagaagcccggcagatctcctcagctgctgatctacctggccagcagcagagcttctggcgtgcccgatagattttctggcagcggcagcgacaaggacttcaccctgaagatctccagagtggaaaccgaggacgtgggcacctactactgtatgcagggcagagagagcccctggacatttggccagggcaccaaggtggacatcaaaggcggcggaggaagcggaggcggaggttctggtggtggtggctctggtggcggaggctcaggcggtggcggatctcaagttcatctgacacagagcggccctgaagtgcggaagcctggcacaagcgtgaaggtgtcctgtaaagcccctggcaacaccctgaaaacctacgacctgcactgggtccgatctgtgcctggacagggactgcaatggatgggctggattagccacgagggcgacaagaaagtgatcgtggaacggttcaaggccaaagtgaccatcgactgggacagaagcaccaacaccgcctacctgcagctgagcggactgacatctggcgataccgccgtgtactactgtgccaagggcagcaagcaccggctgagagattacgccctgtacgacgatgacggcgccctgaattgggccgtcgatgtggactacctgagcaacctggaattctggggccagggaacagccgtgacagtgtcttccggcggaggtggaagtggtggcggcggatctggcggcggtgggtccggaggtggtggatctgaacctaagagcagcgacaagacccacacctgtcctccatgtcctgctccagaactgctggccggaccttccgtgttcctgtttcctccaaagcctaaggacaccctgatgatcagcagaacccctgaagtgacctgcgtggtggtggatgtgtctcacgaggaccctgaagtgaagttcaattggtacgtggacggcgtggaagtgcacaacgccaagaccaagcctagagaggaacagtacaacagcacctacagagtggtgtccgtgctgaccgtgctgcaccaggattggctgaacggcaaagagtacaagtgcaaggtgtccaacaaggccctgcctgcccctgaggaaaagaccatcagcaaggccaagggccagcctagggaaccccaggtttacacactgcctccaagccgcgacgaactgaccaagaaccaggtgtccctgacctgcctcgtgaagggcttctacccttccgatatcgccgtggaatgggagagcaatggccagcctgagaacaactacaagacaacccctcctgtgctggacagcgacggctcattcttcctgtacagcaagctgaccgtggacaagtccagatggcagcagggcaacgtgttcagctgtagcgtgctgcacgaagccctgcacagccactacacccagaaaagcctgtctctgagccccggcaaatgataa

SEQ ID NO: 830 - RNA, 1653 nt, synthetic construct
  source 1..1653: mol_type = other RNA
atggattggatctggcgcatcctgtttctcgtgggagctgccacaggcgcccacagcgattttgtgctgacacagtctccccacagcctgagcgttacacctggcgagtctgccagcatcagctgcaagtctagccactctctgatccacggcgaccggaacaactacctggcttggtacgtgcagaagcccggcagatctcctcagctgctgatctacctggccagcagcagagcttctggcgtgcccgatagattttctggcagcggcagcgacaaggacttcaccctgaagatctccagagtggaaaccgaggacgtgggcacctactactgtatgcagggcagagagagcccctggacatttggccagggcaccaaggtggacatcaaaggcggcggaggaagcggaggcggaggttctggtggtggtggctctggtggcggaggctcaggcggtggcggatctcaagttcatctgacacagagcggccctgaagtgcggaagcctggcacaagcgtgaaggtgtcctgtaaagcccctggcaacaccctgaaaacctacgacctgcactgggtccgatctgtgcctggacagggactgcaatggatgggctggattagccacgagggcgacaagaaagtgatcgtggaacggttcaaggccaaagtgaccatcgactgggacagaagcaccaacaccgcctacctgcagctgagcggactgacatctggcgataccgccgtgtactactgtgccaagggcagcaagcaccggctgagagattacgccctgtacgacgatgacggcgccctgaattgggccgtcgatgtggactacctgagcaacctggaattctggggccagggaacagccgtgacagtgtcttccggcggaggtggaagtggtggcggcggatctggcggcggtgggtccggaggtggtggatctgaacctaagagcagcgacaagacccacacctgtcctccatgtcctgctccagaactgctggccggaccttccgtgttcctgtttcctccaaagcctaaggacaccctgatgatcagcagaacccctgaagtgacctgcgtggtggtggatgtgtctcacgaggaccctgaagtgaagttcaattggtacgtggacggcgtggaagtgcacaacgccaagaccaagcctagagaggaacagtacaacagcacctacagagtggtgtccgtgctgaccgtgctgcaccaggattggctgaacggcaaagagtacaagtgcaaggtgtccaacaaggccctgcctgcccctatcgaaaagaccatcagcaaggccaagggccagcctagggaaccccaggtttacacactgcctccaagccgcgacgaactgaccaagaaccaggtgtccctgacctgcctcgtgaagggcttctacccttccgatatcgccgtggaatgggagagcaatggccagcctgagaacaactacaagacaacccctcctgtgctggacagcgacggctcattcttcctgtacagcaagctgaccgtggacaagtccagatggcagcagggcaacgtgttcagctgtagcgtgctgcacgaagccctgcacagccactacacccagaaaagcctgtctctgagccccggcaaatgataa

SEQ ID NO: 831 - RNA, 1653 nt, synthetic construct
  source 1..1653: mol_type = other RNA
atggattggatctggcgcatcctgtttctcgtgggagctgccacaggcgcccacagcgattttgtgctgacacagtctccccacagcctgagcgttacacctggcgagtctgccagcatcagctgcaagtctagccactctctgatccacggcgaccggaacaactacctggcttggtacgtgcagaagcccggcagatctcctcagctgctgatctacctggccagcagcagagcttctggcgtgcccgatagattttctggcagcggcagcgacaaggacttcaccctgaagatctccagagtggaaaccgaggacgtgggcacctactactgtatgcagggcagagagagcccctggacatttggccagggcaccaaggtggacatcaaaggcggcggaggaagcggaggcggaggttctggtggtggtggctctggtggcggaggctcaggcggtggcggatctcaagttcatctgacacagagcggccctgaagtgcggaagcctggcacaagcgtgaaggtgtcctgtaaagcccctggcaacaccctgaaaacctacgacctgcactgggtccgatctgtgcctggacagggactgcaatggatgggctggattagccacgagggcgacaagaaagtgatcgtggaacggttcaaggccaaagtgaccatcgactgggacagaagcaccaacaccgcctacctgcagctgagcggactgacatctggcgataccgccgtgtactactgtgccaagggcagcaagcaccggctgagagattacgccctgtacgacgatgacggcgccctgaattgggccgtcgatgtggactacctgagcaacctggaattctggggccagggaacagccgtgacagtgtcttccggcggaggtggaagtggtggcggcggatctggcggcggtgggtccggaggtggtggatctgaacctaagagcagcgacaagacccacacctgtcctccatgtcctgctccagaactgctgggcggaccttccgtgttcctgtttcctccaaagcctaaggacaccctgatgatcagcagaacccctgaagtgacctgcgtggtggtggatgtgtctcacgaggaccctgaagtgaagttcaattggtacgtggacggcgtggaagtgcacaacgccaagaccaagcctagagaggaacagtacaacagcacctacagagtggtgtccgtgctgaccgtgctgcaccaggattggctgaacggcaaagagtacaagtgcaaggtgtccaacaaggccctgcctgcccctgaggaaaagaccatcagcaaggccaagggccagcctagggaaccccaggtttacacactgcctccaagccgcgacgaactgaccaagaaccaggtgtccctgacctgcctcgtgaagggcttctacccttccgatatcgccgtggaatgggagagcaatggccagcctgagaacaactacaagacaacccctcctgtgctggacagcgacggctcattcttcctgtacagcaagctgaccgtggacaagtccagatggcagcagggcaacgtgttcagctgtagcgtgctgcacgaagccctgcacagccactacacccagaaaagcctgtctctgagccccggcaaatgataa

SEQ ID NO: 832 - RNA, 1653 nt, synthetic construct
  source 1..1653: mol_type = other RNA
atggattggatctggcgcatcctgtttctcgtgggagctgccacaggcgcccacagcgattttgtgctgacacagtctccccacagcctgagcgttacacctggcgagtctgccagcatcagctgcaagtctagccactctctgatccacggcgaccggaacaactacctggcttggtacgtgcagaagcccggcagatctcctcagctgctgatctacctggccagcagcagagcttctggcgtgcccgatagattttctggcagcggcagcgacaaggacttcaccctgaagatctccagagtggaaaccgaggacgtgggcacctactactgtatgcagggcagagagagcccctggacatttggccagggcaccaaggtggacatcaaaggcggcggaggaagcggaggcggaggttctggtggtggtggctctggtggcggaggctcaggcggtggcggatctcaagttcatctgacacagagcggccctgaagtgcggaagcctggcacaagcgtgaaggtgtcctgtaaagcccctggcaacaccctgaaaacctacgacctgcactgggtccgatctgtgcctggacagggactgcaatggatgggctggattagccacgagggcgacaagaaagtgatcgtggaacggttcaaggccaaagtgaccatcgactgggacagaagcaccaacaccgcctacctgcagctgagcggactgacatctggcgataccgccgtgtactactgtgccaagggcagcaagcaccggctgagagattacgccctgtacgacgatgacggcgccctgaattgggccgtcgatgtggactacctgagcaacctggaattctggggccagggaacagccgtgacagtgtcttccggcggaggtggaagtggtggcggcggatctggcggcggtgggtccggaggtggtggatctgaacctaagagcagcgacaagacccacacctgtcctccatgtcctgctccagaactgctcggcggaccttccgtgttcctgtttcctccaaagcctaaggacaccctgatgatcagcagaacccctgaagtgacctgcgtggtggtggatgtgtctcacgaggaccccgaagtgaagttcaattggtacgtggacggcgtggaagtgcacaacgccaagaccaagcctagagaggaacagtacaacagcacctacagagtggtgtccgtgctgacagtgctgcaccaggattggctgaacggcaaagagtacaagtgcaaggtgtccaacaaggccctgcctgctcctatcgagaaaaccatcagcaaggccaagggccagcctcgcgaacctcaagtctgtacactgcctcctagccgcgacgaactgaccaagaaccaggtgtccctgagctgcgccgtgaagggcttttacccttccgatatcgccgtggaatgggagagcaatggccagcctgagaacaactacaagacaacccctcctgtgctggacagcgacggctcattcttcctggtgtccaagctgacagtggacaagagcagatggcagcagggcaacgtgttcagctgcagcgtgctgcatgaagccctgcacagccactacacccagaagtccctgtctctgagccccggcaagtgataa

SEQ ID NO: 833 - RNA, 1653 nt, synthetic construct
  source 1..1653: mol_type = other RNA
atggattggatctggcgcatcctgtttctcgtgggagctgccacaggcgcccacagcgattttgtgctgacacagtctccccacagcctgagcgttacacctggcgagtctgccagcatcagctgcaagtctagccactctctgatccacggcgaccggaacaactacctggcttggtacgtgcagaagcccggcagatctcctcagctgctgatctacctggccagcagcagagcttctggcgtgcccgatagattttctggcagcggcagcgacaaggacttcaccctgaagatctccagagtggaaaccgaggacgtgggcacctactactgtatgcagggcagagagagcccctggacatttggccagggcaccaaggtggacatcaaaggcggcggaggaagcggaggcggaggttctggtggtggtggctctggtggcggaggctcaggcggtggcggatctcaagttcatctgacacagagcggccctgaagtgcggaagcctggcacaagcgtgaaggtgtcctgtaaagcccctggcaacaccctgaaaacctacgacctgcactgggtccgatctgtgcctggacagggactgcaatggatgggctggattagccacgagggcgacaagaaagtgatcgtggaacggttcaaggccaaagtgaccatcgactgggacagaagcaccaacaccgcctacctgcagctgagcggactgacatctggcgataccgccgtgtactactgtgccaagggcagcaagcaccggctgagagattacgccctgtacgacgatgacggcgccctgaattgggccgtcgatgtggactacctgagcaacctggaattctggggccagggaacagccgtgacagtgtcttccggcggaggtggaagtggtggcggcggatctggcggcggtgggtccggaggtggtggatctgaacctaagagcagcgacaagacccacacctgtcctccatgtcctgctccagaactgctggccggaccttccgtgttcctgtttcctccaaagcctaaggacaccctgatgatcagcagaacccctgaagtgacctgcgtggtggtggatgtgtctcacgaggaccccgaagtgaagttcaattggtacgtggacggcgtggaagtgcacaatgccaagaccaagcctagagaggaacagtacaacagcacctacagagtggtgtccgtgctgaccgtgctgcaccaggattggctgaacggcaaagagtacaagtgcaaggtgtccaacaaggccctgcctctgcctgaggaaaagaccatcagcaaggccaagggccagcctcgcgaacctcaagtctgtacactgcctcctagccgcgacgaactgaccaagaaccaggtgtccctgagctgcgccgtgaagggcttttacccttccgatatcgccgtggaatgggagagcaatggccagcctgagaacaactacaagacaacccctcctgtgctggacagcgacggctcattcttcctggtgtccaagctgacagtggacaagagcagatggcagcagggcaacgtgttcagctgcagcgtgctgcatgaagccctgcacagccactacacccagaagtccctgtctctgagccccggcaagtgataa

SEQ ID NO: 834 - RNA, 1653 nt, synthetic construct
  source 1..1653: mol_type = other RNA
atggattggatctggcgcatcctgtttctcgtgggagctgccacaggcgcccacagcgattttgtgctgacacagtctccccacagcctgagcgttacacctggcgagtctgccagcatcagctgcaagtctagccactctctgatccacggcgaccggaacaactacctggcttggtacgtgcagaagcccggcagatctcctcagctgctgatctacctggccagcagcagagcttctggcgtgcccgatagattttctggcagcggcagcgacaaggacttcaccctgaagatctccagagtggaaaccgaggacgtgggcacctactactgtatgcagggcagagagagcccctggacatttggccagggcaccaaggtggacatcaaaggcggcggaggaagcggaggcggaggttctggtggtggtggctctggtggcggaggctcaggcggtggcggatctcaagttcatctgacacagagcggccctgaagtgcggaagcctggcacaagcgtgaaggtgtcctgtaaagcccctggcaacaccctgaaaacctacgacctgcactgggtccgatctgtgcctggacagggactgcaatggatgggctggattagccacgagggcgacaagaaagtgatcgtggaacggttcaaggccaaagtgaccatcgactgggacagaagcaccaacaccgcctacctgcagctgagcggactgacatctggcgataccgccgtgtactactgtgccaagggcagcaagcaccggctgagagattacgccctgtacgacgatgacggcgccctgaattgggccgtcgatgtggactacctgagcaacctggaattctggggccagggaacagccgtgacagtgtcttccggcggaggtggaagtggtggcggcggatctggcggcggtgggtccggaggtggtggatctgaacctaagagcagcgacaagacccacacctgtcctccatgtcctgctccagaactgctggccggaccttccgtgttcctgtttcctccaaagcctaaggacaccctgatgatcagcagaacccctgaagtgacctgcgtggtggtggatgtgtctcacgaggaccctgaagtgaagttcaattggtacgtggacggcgtggaagtgcacaacgccaagaccaagcctagagaggaacagtacaacagcacctacagagtggtgtccgtgctgaccgtgctgcaccaggattggctgaacggcaaagagtacaagtgcaaggtgtccaacaaggccctgcctgcccctgaggaaaagaccatcagcaaggccaagggccagcctcgcgaacctcaagtctgtacactgcctcctagccgcgacgaactgaccaagaaccaggtgtccctgagctgcgccgtgaagggcttttacccttccgatatcgccgtggaatgggagagcaatggccagcctgagaacaactacaagacaacccctcctgtgctggacagcgacggctcattcttcctggtgtccaagctgacagtggacaagagcagatggcagcagggcaacgtgttcagctgcagcgtgctgcatgaagccctgcacagccactacacccagaagtccctgtctctgagccccggcaagtgataa

SEQ ID NO: 835 - RNA, 1653 nt, synthetic construct
  source 1..1653: mol_type = other RNA
atggattggatctggcgcatcctgtttctcgtgggagctgccacaggcgcccacagcgattttgtgctgacacagtctccccacagcctgagcgttacacctggcgagtctgccagcatcagctgcaagtctagccactctctgatccacggcgaccggaacaactacctggcttggtacgtgcagaagcccggcagatctcctcagctgctgatctacctggccagcagcagagcttctggcgtgcccgatagattttctggcagcggcagcgacaaggacttcaccctgaagatctccagagtggaaaccgaggacgtgggcacctactactgtatgcagggcagagagagcccctggacatttggccagggcaccaaggtggacatcaaaggcggcggaggaagcggaggcggaggttctggtggtggtggctctggtggcggaggctcaggcggtggcggatctcaagttcatctgacacagagcggccctgaagtgcggaagcctggcacaagcgtgaaggtgtcctgtaaagcccctggcaacaccctgaaaacctacgacctgcactgggtccgatctgtgcctggacagggactgcaatggatgggctggattagccacgagggcgacaagaaagtgatcgtggaacggttcaaggccaaagtgaccatcgactgggacagaagcaccaacaccgcctacctgcagctgagcggactgacatctggcgataccgccgtgtactactgtgccaagggcagcaagcaccggctgagagattacgccctgtacgacgatgacggcgccctgaattgggccgtcgatgtggactacctgagcaacctggaattctggggccagggaacagccgtgacagtgtcttccggcggaggtggaagtggtggcggcggatctggcggcggtgggtccggaggtggtggatctgaacctaagagcagcgacaagacccacacctgtcctccatgtcctgctccagaactgctggccggaccttccgtgttcctgtttcctccaaagcctaaggacaccctgatgatcagcagaacccctgaagtgacctgcgtggtggtggatgtgtctcacgaggaccctgaagtgaagttcaattggtacgtggacggcgtggaagtgcacaacgccaagaccaagcctagagaggaacagtacaacagcacctacagagtggtgtccgtgctgaccgtgctgcaccaggattggctgaacggcaaagagtacaagtgcaaggtgtccaacaaggccctgcctgcccctatcgaaaagaccatcagcaaggccaagggccagcctcgcgaacctcaagtctgtacactgcctcctagccgcgacgaactgaccaagaaccaggtgtccctgagctgcgccgtgaagggcttttacccttccgatatcgccgtggaatgggagagcaatggccagcctgagaacaactacaagacaacccctcctgtgctggacagcgacggctcattcttcctggtgtccaagctgacagtggacaagagcagatggcagcagggcaacgtgttcagctgcagcgtgctgcatgaagccctgcacagccactacacccagaagtccctgtctctgagccccggcaagtgataa

SEQ ID NO: 836 - RNA, 1653 nt, synthetic construct
  source 1..1653: mol_type = other RNA
atggattggatctggcgcatcctgtttctcgtgggagctgccacaggcgcccacagcgattttgtgctgacacagtctccccacagcctgagcgttacacctggcgagtctgccagcatcagctgcaagtctagccactctctgatccacggcgaccggaacaactacctggcttggtacgtgcagaagcccggcagatctcctcagctgctgatctacctggccagcagcagagcttctggcgtgcccgatagattttctggcagcggcagcgacaaggacttcaccctgaagatctccagagtggaaaccgaggacgtgggcacctactactgtatgcagggcagagagagcccctggacatttggccagggcaccaaggtggacatcaaaggcggcggaggaagcggaggcggaggttctggtggtggtggctctggtggcggaggctcaggcggtggcggatctcaagttcatctgacacagagcggccctgaagtgcggaagcctggcacaagcgtgaaggtgtcctgtaaagcccctggcaacaccctgaaaacctacgacctgcactgggtccgatctgtgcctggacagggactgcaatggatgggctggattagccacgagggcgacaagaaagtgatcgtggaacggttcaaggccaaagtgaccatcgactgggacagaagcaccaacaccgcctacctgcagctgagcggactgacatctggcgataccgccgtgtactactgtgccaagggcagcaagcaccggctgagagattacgccctgtacgacgatgacggcgccctgaattgggccgtcgatgtggactacctgagcaacctggaattctggggccagggaacagccgtgacagtgtcttccggcggaggtggaagtggtggcggcggatctggcggcggtgggtccggaggtggtggatctgaacctaagagcagcgacaagacccacacctgtcctccatgtcctgctccagaactgctgggcggaccttccgtgttcctgtttcctccaaagcctaaggacaccctgatgatcagcagaacccctgaagtgacctgcgtggtggtggatgtgtctcacgaggaccctgaagtgaagttcaattggtacgtggacggcgtggaagtgcacaacgccaagaccaagcctagagaggaacagtacaacagcacctacagagtggtgtccgtgctgaccgtgctgcaccaggattggctgaacggcaaagagtacaagtgcaaggtgtccaacaaggccctgcctgcccctgaggaaaagaccatcagcaaggccaagggccagcctcgcgaacctcaagtctgtacactgcctcctagccgcgacgaactgaccaagaaccaggtgtccctgagctgcgccgtgaagggcttttacccttccgatatcgccgtggaatgggagagcaatggccagcctgagaacaactacaagacaacccctcctgtgctggacagcgacggctcattcttcctggtgtccaagctgacagtggacaagagcagatggcagcagggcaacgtgttcagctgcagcgtgctgcatgaagccctgcacagccactacacccagaagtccctgtctctgagccccggcaagtgataa

SEQ ID NO: 837 - RNA, 1653 nt, synthetic construct
  source 1..1653: mol_type = other RNA
atggattggatctggcgcatcctgtttctcgtgggagctgccacaggcgcccacagcgattttgtgctgacacagtctccccacagcctgagcgttacacctggcgagtctgccagcatcagctgcaagtctagccactctctgatccacggcgaccggaacaactacctggcttggtacgtgcagaagcccggcagatctcctcagctgctgatctacctggccagcagcagagcttctggcgtgcccgatagattttctggcagcggcagcgacaaggacttcaccctgaagatctccagagtggaaaccgaggacgtgggcacctactactgtatgcagggcagagagagcccctggacatttggccagggcaccaaggtggacatcaaaggcggcggaggaagcggaggcggaggttctggtggtggtggctctggtggcggaggctcaggcggtggcggatctcaagttcatctgacacagagcggccctgaagtgcggaagcctggcacaagcgtgaaggtgtcctgtaaagcccctggcaacaccctgaaaacctacgacctgcactgggtccgatctgtgcctggacagggactgcaatggatgggctggattagccacgagggcgacaagaaagtgatcgtggaacggttcaaggccaaagtgaccatcgactgggacagaagcaccaacaccgcctacctgcagctgagcggactgacatctggcgataccgccgtgtactactgtgccaagggcagcaagcaccggctgagagattacgccctgtacgacgatgacggcgccctgaattgggccgtcgatgtggactacctgagcaacctggaattctggggccagggaacagccgtgacagtgtcttccggcggaggtggaagtggtggcggcggatctggcggcggtgggtccggaggtggtggatctgaacctaagagcagcgacaagacccacacctgtcctccatgtcctgctccagaactgctcggcggaccttccgtgttcctgtttcctccaaagcctaaggacaccctgatgatcagcagaacccctgaagtgacctgcgtggtggtggatgtgtctcacgaggaccccgaagtgaagttcaattggtacgtggacggcgtggaagtgcacaacgccaagaccaagcctagagaggaacagtacaacagcacctacagagtggtgtccgtgctgacagtgctgcaccaggattggctgaacggcaaagagtacaagtgcaaggtgtccaacaaggccctgcctgctcctatcgagaaaaccatcagcaaggccaagggccagcctagggaaccccaggtttacaccctgcctccatgccgcgacgaactgaccaagaaccaggtgtccctgtggtgcctggtcaagggcttctacccttccgatatcgccgtggaatgggagagcaatggccagcctgagaacaactacaagacaacccctcctgtgctggacagcgacggctcattcttcctgtacagcaagctgacagtggacaagagcagatggcagcagggcaacgtgttcagctgcagcgtgctgcatgaagccctgcacagccactacacccagaagtccctgtctctgagccccggcaagtgataa

SEQ ID NO: 838 - RNA, 1653 nt, synthetic construct
  source 1..1653: mol_type = other RNA
atggattggatctggcgcatcctgtttctcgtgggagctgccacaggcgcccacagcgattttgtgctgacacagtctccccacagcctgagcgttacacctggcgagtctgccagcatcagctgcaagtctagccactctctgatccacggcgaccggaacaactacctggcttggtacgtgcagaagcccggcagatctcctcagctgctgatctacctggccagcagcagagcttctggcgtgcccgatagattttctggcagcggcagcgacaaggacttcaccctgaagatctccagagtggaaaccgaggacgtgggcacctactactgtatgcagggcagagagagcccctggacatttggccagggcaccaaggtggacatcaaaggcggcggaggaagcggaggcggaggttctggtggtggtggctctggtggcggaggctcaggcggtggcggatctcaagttcatctgacacagagcggccctgaagtgcggaagcctggcacaagcgtgaaggtgtcctgtaaagcccctggcaacaccctgaaaacctacgacctgcactgggtccgatctgtgcctggacagggactgcaatggatgggctggattagccacgagggcgacaagaaagtgatcgtggaacggttcaaggccaaagtgaccatcgactgggacagaagcaccaacaccgcctacctgcagctgagcggactgacatctggcgataccgccgtgtactactgtgccaagggcagcaagcaccggctgagagattacgccctgtacgacgatgacggcgccctgaattgggccgtcgatgtggactacctgagcaacctggaattctggggccagggaacagccgtgacagtgtcttccggcggaggtggaagtggtggcggcggatctggcggcggtgggtccggaggtggtggatctgaacctaagagcagcgacaagacccacacctgtcctccatgtcctgctccagaactgctggccggaccttccgtgttcctgtttcctccaaagcctaaggacaccctgatgatcagcagaacccctgaagtgacctgcgtggtggtggatgtgtctcacgaggaccccgaagtgaagttcaattggtacgtggacggcgtggaagtgcacaatgccaagaccaagcctagagaggaacagtacaacagcacctacagagtggtgtccgtgctgaccgtgctgcaccaggattggctgaacggcaaagagtacaagtgcaaggtgtccaacaaggccctgcctctgcctgaggaaaagaccatcagcaaggccaagggccagcctagggaaccccaggtttacaccctgcctccatgccgcgacgaactgaccaagaaccaggtgtccctgtggtgcctggtcaagggcttctacccttccgatatcgccgtggaatgggagagcaatggccagcctgagaacaactacaagacaacccctcctgtgctggacagcgacggctcattcttcctgtacagcaagctgacagtggacaagagcagatggcagcagggcaacgtgttcagctgcagcgtgctgcatgaagccctgcacagccactacacccagaagtccctgtctctgagccccggcaagtgataa

SEQ ID NO: 839 - RNA, 1653 nt, synthetic construct
  source 1..1653: mol_type = other RNA
atggattggatctggcgcatcctgtttctcgtgggagctgccacaggcgcccacagcgattttgtgctgacacagtctccccacagcctgagcgttacacctggcgagtctgccagcatcagctgcaagtctagccactctctgatccacggcgaccggaacaactacctggcttggtacgtgcagaagcccggcagatctcctcagctgctgatctacctggccagcagcagagcttctggcgtgcccgatagattttctggcagcggcagcgacaaggacttcaccctgaagatctccagagtggaaaccgaggacgtgggcacctactactgtatgcagggcagagagagcccctggacatttggccagggcaccaaggtggacatcaaaggcggcggaggaagcggaggcggaggttctggtggtggtggctctggtggcggaggctcaggcggtggcggatctcaagttcatctgacacagagcggccctgaagtgcggaagcctggcacaagcgtgaaggtgtcctgtaaagcccctggcaacaccctgaaaacctacgacctgcactgggtccgatctgtgcctggacagggactgcaatggatgggctggattagccacgagggcgacaagaaagtgatcgtggaacggttcaaggccaaagtgaccatcgactgggacagaagcaccaacaccgcctacctgcagctgagcggactgacatctggcgataccgccgtgtactactgtgccaagggcagcaagcaccggctgagagattacgccctgtacgacgatgacggcgccctgaattgggccgtcgatgtggactacctgagcaacctggaattctggggccagggaacagccgtgacagtgtcttccggcggaggtggaagtggtggcggcggatctggcggcggtgggtccggaggtggtggatctgaacctaagagcagcgacaagacccacacctgtcctccatgtcctgctccagaactgctggccggaccttccgtgttcctgtttcctccaaagcctaaggacaccctgatgatcagcagaacccctgaagtgacctgcgtggtggtggatgtgtctcacgaggaccctgaagtgaagttcaattggtacgtggacggcgtggaagtgcacaacgccaagaccaagcctagagaggaacagtacaacagcacctacagagtggtgtccgtgctgaccgtgctgcaccaggattggctgaacggcaaagagtacaagtgcaaggtgtccaacaaggccctgcctgcccctgaggaaaagaccatcagcaaggccaagggccagcctagggaaccccaggtttacaccctgcctccatgccgcgacgaactgaccaagaaccaggtgtccctgtggtgcctggtcaagggcttctacccttccgatatcgccgtggaatgggagagcaatggccagcctgagaacaactacaagacaacccctcctgtgctggacagcgacggctcattcttcctgtacagcaagctgacagtggacaagagcagatggcagcagggcaacgtgttcagctgcagcgtgctgcatgaagccctgcacagccactacacccagaagtccctgtctctgagccccggcaagtgataa

SEQ ID NO: 840 - RNA, 1653 nt, synthetic construct
  source 1..1653: mol_type = other RNA
atggattggatctggcgcatcctgtttctcgtgggagctgccacaggcgcccacagcgattttgtgctgacacagtctccccacagcctgagcgttacacctggcgagtctgccagcatcagctgcaagtctagccactctctgatccacggcgaccggaacaactacctggcttggtacgtgcagaagcccggcagatctcctcagctgctgatctacctggccagcagcagagcttctggcgtgcccgatagattttctggcagcggcagcgacaaggacttcaccctgaagatctccagagtggaaaccgaggacgtgggcacctactactgtatgcagggcagagagagcccctggacatttggccagggcaccaaggtggacatcaaaggcggcggaggaagcggaggcggaggttctggtggtggtggctctggtggcggaggctcaggcggtggcggatctcaagttcatctgacacagagcggccctgaagtgcggaagcctggcacaagcgtgaaggtgtcctgtaaagcccctggcaacaccctgaaaacctacgacctgcactgggtccgatctgtgcctggacagggactgcaatggatgggctggattagccacgagggcgacaagaaagtgatcgtggaacggttcaaggccaaagtgaccatcgactgggacagaagcaccaacaccgcctacctgcagctgagcggactgacatctggcgataccgccgtgtactactgtgccaagggcagcaagcaccggctgagagattacgccctgtacgacgatgacggcgccctgaattgggccgtcgatgtggactacctgagcaacctggaattctggggccagggaacagccgtgacagtgtcttccggcggaggtggaagtggtggcggcggatctggcggcggtgggtccggaggtggtggatctgaacctaagagcagcgacaagacccacacctgtcctccatgtcctgctccagaactgctggccggaccttccgtgttcctgtttcctccaaagcctaaggacaccctgatgatcagcagaacccctgaagtgacctgcgtggtggtggatgtgtctcacgaggaccctgaagtgaagttcaattggtacgtggacggcgtggaagtgcacaacgccaagaccaagcctagagaggaacagtacaacagcacctacagagtggtgtccgtgctgaccgtgctgcaccaggattggctgaacggcaaagagtacaagtgcaaggtgtccaacaaggccctgcctgcccctatcgaaaagaccatcagcaaggccaagggccagcctagggaaccccaggtttacaccctgcctccatgccgcgacgaactgaccaagaaccaggtgtccctgtggtgcctggtcaagggcttctacccttccgatatcgccgtggaatgggagagcaatggccagcctgagaacaactacaagacaacccctcctgtgctggacagcgacggctcattcttcctgtacagcaagctgacagtggacaagagcagatggcagcagggcaacgtgttcagctgcagcgtgctgcatgaagccctgcacagccactacacccagaagtccctgtctctgagccccggcaagtgataa

SEQ ID NO: 841 - RNA, 1653 nt, synthetic construct
  source 1..1653: mol_type = other RNA
atggattggatctggcgcatcctgtttctcgtgggagctgccacaggcgcccacagcgattttgtgctgacacagtctccccacagcctgagcgttacacctggcgagtctgccagcatcagctgcaagtctagccactctctgatccacggcgaccggaacaactacctggcttggtacgtgcagaagcccggcagatctcctcagctgctgatctacctggccagcagcagagcttctggcgtgcccgatagattttctggcagcggcagcgacaaggacttcaccctgaagatctccagagtggaaaccgaggacgtgggcacctactactgtatgcagggcagagagagcccctggacatttggccagggcaccaaggtggacatcaaaggcggcggaggaagcggaggcggaggttctggtggtggtggctctggtggcggaggctcaggcggtggcggatctcaagttcatctgacacagagcggccctgaagtgcggaagcctggcacaagcgtgaaggtgtcctgtaaagcccctggcaacaccctgaaaacctacgacctgcactgggtccgatctgtgcctggacagggactgcaatggatgggctggattagccacgagggcgacaagaaagtgatcgtggaacggttcaaggccaaagtgaccatcgactgggacagaagcaccaacaccgcctacctgcagctgagcggactgacatctggcgataccgccgtgtactactgtgccaagggcagcaagcaccggctgagagattacgccctgtacgacgatgacggcgccctgaattgggccgtcgatgtggactacctgagcaacctggaattctggggccagggaacagccgtgacagtgtcttccggcggaggtggaagtggtggcggcggatctggcggcggtgggtccggaggtggtggatctgaacctaagagcagcgacaagacccacacctgtcctccatgtcctgctccagaactgctgggcggaccttccgtgttcctgtttcctccaaagcctaaggacaccctgatgatcagcagaacccctgaagtgacctgcgtggtggtggatgtgtctcacgaggaccctgaagtgaagttcaattggtacgtggacggcgtggaagtgcacaacgccaagaccaagcctagagaggaacagtacaacagcacctacagagtggtgtccgtgctgaccgtgctgcaccaggattggctgaacggcaaagagtacaagtgcaaggtgtccaacaaggccctgcctgcccctgaggaaaagaccatcagcaaggccaagggccagcctagggaaccccaggtttacaccctgcctccatgccgcgacgaactgaccaagaaccaggtgtccctgtggtgcctggtcaagggcttctacccttccgatatcgccgtggaatgggagagcaatggccagcctgagaacaactacaagacaacccctcctgtgctggacagcgacggctcattcttcctgtacagcaagctgacagtggacaagagcagatggcagcagggcaacgtgttcagctgcagcgtgctgcatgaagccctgcacagccactacacccagaagtccctgtctctgagccccggcaagtgataa

SEQ ID NO: 842 - DNA, 720 bp, synthetic construct
  source 1..720: mol_type = other DNA
atggattggatttggagaatcctgttcctcgtgggcgccgctaccggagcccactccgattttgtcctgactcagtctccacactctctgtccgtcacccctggagagtcggcctccatctcctgcaagtctagtcacagcctcattcatggtgataggaacaattatttggcttggtacgtacagaagccagggcggtctccacaactcctgatctatttggcttccagtcgggcctccggggtccctgacaggttcagtggcagtggatcggacaaagattttacactgaagatcagcagagtggagactgaggatgttgggacgtattactgcatgcaaggtcgagaaagtccctggacgttcggccaagggaccaaggtggacatcaaacgtacggtggccgctcctagcgtgttcatctttccacctagcgacgagcagctgaagtctggcacagcctctgtcgtgtgcctgctcaacaacttctaccccagagaagccaaggtgcagtggaaggtggacaacgccctgcagagcggcaatagccaagagagcgtgaccgagcaggacagcaaggactctacctacagcctgagcagcacactgaccctgagcaaggccgactacgagaagcacaaagtgtacgcctgcgaagtgacccaccagggcctttctagccctgtgaccaagagcttcaaccggggcgagtgctgataa

SEQ ID NO: 843 - RNA, 720 nt, synthetic construct
  source 1..720: mol_type = other RNA
atggattggatttggagaatcctgttcctcgtgggcgccgctaccggagcccactccgattttgtcctgactcagtctccacactctctgtccgtcacccctggagagtcggcctccatctcctgcaagtctagtcacagcctcattcatggtgataggaacaattatttggcttggtacgtacagaagccagggcggtctccacaactcctgatctatttggcttccagtcgggcctccggggtccctgacaggttcagtggcagtggatcggacaaagattttacactgaagatcagcagagtggagactgaggatgttgggacgtattactgcatgcaaggtcgagaaagtccctggacgttcggccaagggaccaaggtggacatcaaacgtacggtggccgctcctagcgtgttcatctttccacctagcgacgagcagctgaagtctggcacagcctctgtcgtgtgcctgctcaacaacttctaccccagagaagccaaggtgcagtggaaggtggacaacgccctgcagagcggcaatagccaagagagcgtgaccgagcaggacagcaaggactctacctacagcctgagcagcacactgaccctgagcaaggccgactacgagaagcacaaagtgtacgcctgcgaagtgacccaccagggcctttctagccctgtgaccaagagcttcaaccggggcgagtgctgataa

SEQ ID NO: 844 - DNA, 714 bp, synthetic construct
  source 1..714: mol_type = other DNA
atggattggatctggcgcatcctgtttctcgtgggagctgccacaggcgcccacagcgattttgtgctgacacagtctccccacagcctgagcgttacacctggcgagtctgccagcatcagctgcaagtctagccactctctgatccacggcgaccggaacaactacctggcttggtacgtgcagaagcccggcagatctcctcagctgctgatctacctggccagcagcagagctagcggcgtgccagatagattttctggcagcggcagcgacaaggacttcaccctgaagatctccagagtggaaaccgaggacgtgggcacctactactgtatgcagggcagagagagcccctggacatttggccagggcaccaaggtggacatcaagagcagcgcctctacaaagggccccagcgttttcccactggctcctagcagcaagagcacatctggcggaacagccgctctgggctgtctggtcaaggactactttcccgagcctgtgaccgtgtcctggaattctggcgctctgacatccggcgtgcacacctttccagctgtgctgcaaagcagcggcctgtactctctgagcagcgtggtcacagtgccaagctctagcctgggcacccagacctacatctgcaatgtgaaccacaagcctagcaacacgaaggtcgacaagagagtggaacccaagtcctgctgataa

SEQ ID NO: 845 - DNA, 714 bp, synthetic construct
  source 1..714: mol_type = other DNA
atggattggatctggcgcatcctgtttctcgtgggagctgccacaggcgcccacagcgattttgtgctgacacagtctccccacagcctgagcgttacacctggcgagtctgccagcatcagctgcaagtctagccactctctgatccacggcgaccggaacaactacctggcttggtacgtgcagaagcccggcagatctcctcagctgctgatctacctggccagcagcagagctagcggcgtgccagatagattttctggcagcggcagcgacaaggacttcaccctgaagatctccagagtggaaaccgaggacgtgggcacctactactgtatgcagggcagagagagcccctggacatttggccagggcaccaaggtggacatcaagagcagcgcctctacaaagggccccagcgttttcccactggctcctagcagcaagagcacatctggcggaacagccgctctgggctgtctggtcaaggactactttcccgagcctgtgaccgtgtcctggaattctggcgctctgacatccggcgtgcacacctttccagctgtgctgcaaagcagcggcctgtactctctgagcagcgtggtcacagtgccaagctctagcctgggcacccagacctacatctgcaatgtgaaccacaagcctagcaacacgaaggtcgacaagaaggtggaacccaagtcctgctgataa

SEQ ID NO: 846 - RNA, 714 nt, synthetic construct
  source 1..714: mol_type = other RNA
atggattggatctggcgcatcctgtttctcgtgggagctgccacaggcgcccacagcgattttgtgctgacacagtctccccacagcctgagcgttacacctggcgagtctgccagcatcagctgcaagtctagccactctctgatccacggcgaccggaacaactacctggcttggtacgtgcagaagcccggcagatctcctcagctgctgatctacctggccagcagcagagctagcggcgtgccagatagattttctggcagcggcagcgacaaggacttcaccctgaagatctccagagtggaaaccgaggacgtgggcacctactactgtatgcagggcagagagagcccctggacatttggccagggcaccaaggtggacatcaagagcagcgcctctacaaagggccccagcgttttcccactggctcctagcagcaagagcacatctggcggaacagccgctctgggctgtctggtcaaggactactttcccgagcctgtgaccgtgtcctggaattctggcgctctgacatccggcgtgcacacctttccagctgtgctgcaaagcagcggcctgtactctctgagcagcgtggtcacagtgccaagctctagcctgggcacccagacctacatctgcaatgtgaaccacaagcctagcaacacgaaggtcgacaagagagtggaacccaagtcctgctgataa

SEQ ID NO: 847 - RNA, 714 nt, synthetic construct
  source 1..714: mol_type = other RNA
atggattggatctggcgcatcctgtttctcgtgggagctgccacaggcgcccacagcgattttgtgctgacacagtctccccacagcctgagcgttacacctggcgagtctgccagcatcagctgcaagtctagccactctctgatccacggcgaccggaacaactacctggcttggtacgtgcagaagcccggcagatctcctcagctgctgatctacctggccagcagcagagctagcggcgtgccagatagattttctggcagcggcagcgacaaggacttcaccctgaagatctccagagtggaaaccgaggacgtgggcacctactactgtatgcagggcagagagagcccctggacatttggccagggcaccaaggtggacatcaagagcagcgcctctacaaagggccccagcgttttcccactggctcctagcagcaagagcacatctggcggaacagccgctctgggctgtctggtcaaggactactttcccgagcctgtgaccgtgtcctggaattctggcgctctgacatccggcgtgcacacctttccagctgtgctgcaaagcagcggcctgtactctctgagcagcgtggtcacagtgccaagctctagcctgggcacccagacctacatctgcaatgtgaaccacaagcctagcaacacgaaggtcgacaagaaggtggaacccaagtcctgctgataa

SEQ ID NO: 848 - RNA, 720 nt, synthetic construct
  source 1..720: mol_type = other RNA
atggattggatttggagaatcctgttcctcgtgggcgccgctaccggagcccactccgattttgtcctgactcagtctccacactctctgtccgtcacccctggagagtcggcctccatctcctgcaagtctagtcacagcctcattcatggtgataggaacaattatttggcttggtacgtacagaagccagggcggtctccacaactcctgatctatttggcttccagtcgggcctccggggtccctgacaggttcagtggcagtggatcggacaaagattttacactgaagatcagcagagtggagactgaggatgttgggacgtattactgcatgcaaggtcgagaaagtccctggacgttcggccaagggaccaaggtggacatcaaacgtacggtggccgctcctagcgtgttcatctttccacctagcgacaagagactgaagtctggcacagcctctgtcgtgtgcctgctcaacaacttctaccccagagaagccaaggtgcagtggaaggtggacaacgccctgcagagcggcaatagccaagagagcgtgaccgagcaggacagcaaggactctacctacagcctgagcagcacactgaccctgagcaaggccgactacgagaagcacaaagtgtacgcctgcgaagtgacccaccagggcctttctagccctgtgaccaagagcttcaaccggggcgagtgctgataa

SEQ ID NO: 849 - RNA, 720 nt, synthetic construct
  source 1..720: mol_type = other RNA
atggattggatttggagaatcctgttcctcgtgggcgccgctaccggagcccactccgattttgtcctgactcagtctccacactctctgtccgtcacccctggagagtcggcctccatctcctgcaagtctagtcacagcctcattcatggtgataggaacaattatttggcttggtacgtacagaagccagggcggtctccacaactcctgatctatttggcttccagtcgggcctccggggtccctgacaggttcagtggcagtggatcggacaaagattttacactgaagatcagcagagtggagactgaggatgttgggacgtattactgcatgcaaggtcgagaaagtccctggacgttcggccaagggaccaaggtggacatcaaacgtacggtggccgctcctagcgtgttcatctttccacctagcgacagaaagctgaagtctggcacagcctctgtcgtgtgcctgctcaacaacttctaccccagagaagccaaggtgcagtggaaggtggacaacgccctgcagagcggcaatagccaagagagcgtgaccgagcaggacagcaaggactctacctacagcctgagcagcacactgaccctgagcaaggccgactacgagaagcacaaagtgtacgcctgcgaagtgacccaccagggcctttctagccctgtgaccaagagcttcaaccggggcgagtgctgataa

SEQ ID NO: 850 - RNA, 1937 nt, synthetic construct
  source 1..1937: mol_type = other RNA
agaataaactagtattcttctggtccccacagactcagagagaacccgccaccatggattggatttggagaatcctgttcctcgtgggcgccgctaccggagcccactcccaggtgcatctgacgcagtctgggcctgaggtgaggaagcctgggacctccgtaaaggtctcctgcaaggcccctggaaacacattgaagacttatgatctacactgggtgcgcagcgtccctggacaaggccttcagtggatgggatggataagccatgagggcgacaagaaggtcattgtggaaagattcaaggccaaagtcaccattgattgggacaggtccaccaatacggcctatctccaactgagcggcctcacatctggcgacacggccgtctattattgtgcgaaaggctcaaaacacaggctgcgagattacgctctctacgacgacgacggcgcattgaattgggctgtcgatgttgactacctttcgaacttggaattctggggccaagggaccgccgtcaccgtctcttcagcctctacaaagggccctagcgtgttccctctggctcctagcagcaagtcgacatctggcggaacagccgctctgggctgtctggtcaaggactactttcccgagcctgtgacagtgtcctggaactctggcgctctgacaagcggcgtgcacacatttccagccgtgctgcaaagcagcggcctgtactctctgagcagcgtggtcacagtgccaagctctagcctgggcacccagacctacatctgcaatgtgaaccacaagcctagcaacaccaaggtggacaagagagtggaacccaagagctgcgacaagacccacacctgtcctccatgtcctgctccagaactgctcggcggaccttccgtgttcctgtttcctccaaagcctaaggacaccctgatgatcagcagaacccctgaagtgacctgcgtggtggtggatgtgtctcacgaggaccccgaagtgaagttcaattggtacgtggacggcgtggaagtgcacaacgccaagaccaagcctagagaggaacagtacaacagcacctacagagtggtgtccgtgctgacagtgctgcaccaggattggctgaacggcaaagagtacaagtgcaaggtgtccaacaaggccctgcctgctcctatcgagaaaaccatcagcaaggccaagggccagcctagggaaccccaggtttacacactgcctccaagccgcgaggaaatgaccaagaaccaggtgtccctgacctgcctcgtgaagggcttctacccttccgatatcgccgtggaatgggagagcaatggccagcctgagaacaactacaagacaacccctcctgtgctggacagcgacggctcattcttcctgtacagcaagctgactgtggataagtcccggtggcagcagggcaacgtgttcagctgttctgtgatgcacgaagccctgcacaaccactacacccagaaaagcctgtctctgagccccggcaagtgataaggatccgatctggtactgcatgcacgcaatgctagctgcccctttcccgtcctgggtaccccgagtctcccccgacctcgggtcccaggtatgctcccacctccacctgccccactcaccacctctgctagttccagacacctcccaagcacgcagcaatgcagctcaaaacgcttagcctagccacacccccacgggaaacagcagtgattaacctttagcaataaacgaaagtttaactaagctatactaaccccagggttggtcaatttcgtgccagccacaccctcgagctagcaaaaaaaaaaaaaaaaaaaaaaaaaaaaaagcatatgactaaaaaaaaaaaaaaaaaaaaaaaaaaaaaaaaaaaaaaaaaaaaaaaaaaaaaaaaaaaaaaaaaaaaaa

SEQ ID NO: 851 - RNA, 1937 nt, synthetic construct
  source 1..1937: mol_type = other RNA
agaataaactagtattcttctggtccccacagactcagagagaacccgccaccatggattggatttggagaatcctgttcctcgtgggcgccgctaccggagcccactcccaggtgcatctgacgcagtctgggcctgaggtgaggaagcctgggacctccgtaaaggtctcctgcaaggcccctggaaacacattgaagacttatgatctacactgggtgcgcagcgtccctggacaaggccttcagtggatgggatggataagccatgagggcgacaagaaggtcattgtggaaagattcaaggccaaagtcaccattgattgggacaggtccaccaatacggcctatctccaactgagcggcctcacatctggcgacacggccgtctattattgtgcgaaaggctcaaaacacaggctgcgagattacgctctctacgacgacgacggcgcattgaattgggctgtcgatgttgactacctttcgaacttggaattctggggccaagggaccgccgtcaccgtctcttcagcctctacaaagggccctagcgtgttccctctggctcctagcagcaagtcgacatctggcggaacagccgctctgggctgtctggtcaaggactactttcccgagcctgtgacagtgtcctggaactctggcgctctgacaagcggcgtgcacacatttccagccgtgctgcaaagcagcggcctgtactctctgagcagcgtggtcacagtgccaagctctagcctgggcacccagacctacatctgcaatgtgaaccacaagcctagcaacaccaaggtggacaagagagtggaacccaagagctgcgacaagacccacacctgtcctccatgtcctgctccagaactgctcggcggaccttccgtgttcctgtttcctccaaagcctaaggacaccctgatgatcagcagaacccctgaagtgacctgcgtggtggtggatgtgtctcacgaggaccccgaagtgaagttcaattggtacgtggacggcgtggaagtgcacaacgccaagaccaagcctagagaggaacagtacaacagcacctacagagtggtgtccgtgctgacagtgctgcaccaggattggctgaacggcaaagagtacaagtgcaaggtgtccaacaaggccctgcctgctcctatcgagaaaaccatcagcaaggccaagggccagcctagggaaccccaggtttacacactgcctccaagccgcgaggaaatgaccaagaaccaggtgtccctgacctgcctcgtgaagggcttctacccttccgatatcgccgtggaatgggagagcaatggccagcctgagaacaactacaagacaacccctcctgtgctggacagcgacggctcattcttcctgtacagcaagctgaccgtggacaagtccagatggcagcagggcaacgtgttcagctgtagcgtgctgcacgaagccctgcacagccactacacccagaaaagcctgtctctgagccccggcaaatgataaggatccgatctggtactgcatgcacgcaatgctagctgcccctttcccgtcctgggtaccccgagtctcccccgacctcgggtcccaggtatgctcccacctccacctgccccactcaccacctctgctagttccagacacctcccaagcacgcagcaatgcagctcaaaacgcttagcctagccacacccccacgggaaacagcagtgattaacctttagcaataaacgaaagtttaactaagctatactaaccccagggttggtcaatttcgtgccagccacaccctcgagctagcaaaaaaaaaaaaaaaaaaaaaaaaaaaaaagcatatgactaaaaaaaaaaaaaaaaaaaaaaaaaaaaaaaaaaaaaaaaaaaaaaaaaaaaaaaaaaaaaaaaaaaaaa

SEQ ID NO: 852 - RNA, 1937 nt, synthetic construct
  source 1..1937: mol_type = other RNA
agaataaactagtattcttctggtccccacagactcagagagaacccgccaccatggattggatttggagaatcctgttcctcgtgggcgccgctaccggagcccactcccaggtgcatctgacgcagtctgggcctgaggtgaggaagcctgggacctccgtaaaggtctcctgcaaggcccctggaaacacattgaagacttatgatctacactgggtgcgcagcgtccctggacaaggccttcagtggatgggatggataagccatgagggcgacaagaaggtcattgtggaaagattcaaggccaaagtcaccattgattgggacaggtccaccaatacggcctatctccaactgagcggcctcacatctggcgacacggccgtctattattgtgcgaaaggctcaaaacacaggctgcgagattacgctctctacgacgacgacggcgcattgaattgggctgtcgatgttgactacctttcgaacttggaattctggggccaagggaccgccgtcaccgtctcttcagcctctacaaagggccctagcgtgttccctctggctcctagcagcaagtcgacatctggcggaacagccgctctgggctgtctggtcaaggactactttcccgagcctgtgacagtgtcctggaactctggcgctctgacaagcggcgtgcacacatttccagccgtgctgcaaagcagcggcctgtactctctgagcagcgtggtcacagtgccaagctctagcctgggcacccagacctacatctgcaatgtgaaccacaagcctagcaacaccaaggtggacaagagagtggaacccaagagctgcgacaagacccacacctgtcctccatgtcctgctccagaactgctcggcggaccttccgtgttcctgtttcctccaaagcctaaggacaccctgatgatcagcagaacccctgaagtgacctgcgtggtggtggatgtgtctcacgaggaccccgaagtgaagttcaattggtacgtggacggcgtggaagtgcacaacgccaagaccaagcctagagaggaacagtacaacagcacctacagagtggtgtccgtgctgacagtgctgcaccaggattggctgaacggcaaagagtacaagtgcaaggtgtccaacaaggccctgcctgctcctatcgagaaaaccatcagcaaggccaagggccagcctagggaaccccaagtctgtacactgcctcctagccgcgaggaaatgaccaagaaccaggtgtccctgagctgcgccgtgaagggcttttacccttccgatatcgccgtggaatgggagagcaatggccagcctgagaacaactacaagacaacccctcctgtgctggacagcgacggctcattcttcctggtgtccaagctgacagtggacaagagcagatggcagcagggcaacgtgttcagctgctctgtgctgcacgaagccctgcacagccactacacccagaagtccctgtctctgagccccggcaagtgataaggatccgatctggtactgcatgcacgcaatgctagctgcccctttcccgtcctgggtaccccgagtctcccccgacctcgggtcccaggtatgctcccacctccacctgccccactcaccacctctgctagttccagacacctcccaagcacgcagcaatgcagctcaaaacgcttagcctagccacacccccacgggaaacagcagtgattaacctttagcaataaacgaaagtttaactaagctatactaaccccagggttggtcaatttcgtgccagccacaccctcgagctagcaaaaaaaaaaaaaaaaaaaaaaaaaaaaaagcatatgactaaaaaaaaaaaaaaaaaaaaaaaaaaaaaaaaaaaaaaaaaaaaaaaaaaaaaaaaaaaaaaaaaaaaaa

SEQ ID NO: 853 - RNA, 1937 nt, synthetic construct
  source 1..1937: mol_type = other RNA
agaataaactagtattcttctggtccccacagactcagagagaacccgccaccatggactggatctggcgcatcctgtttcttgtgggagccgccacaggcgcccattctcaagttcatctgacacagagcggccctgaagtgcggaagcctggcacaagcgtgaaggtgtcctgtaaagcccctggcaacaccctgaaaacctacgacctgcactgggtccgatctgtgcctggacaaggactgcagtggatgggctggattagccacgagggcgacaagaaagtgatcgtggaacggttcaaggccaaagtgaccatcgactgggacagaagcaccaacaccgcctacctgcagctgagcggactgacatctggcgataccgccgtgtactactgtgccaagggcagcaagcaccggctgagagattacgccctgtacgacgatgacggcgccctgaattgggccgtcgatgtggactacctgagcaacctggaattctggggccagggaacagccgtgacagtgtctagcgcctctacaaagggccctagcgtgttccctctggctcctagcagcaagtcgacatctggcggaacagccgctctgggctgtctggtcaaggactactttcccgagcctgtgacagtgtcctggaactctggcgctctgacaagcggcgtgcacacatttccagccgtgctgcaaagcagcggcctgtactctctgagcagcgtggtcacagtgccaagctctagcctgggcacccagacctacatctgcaatgtgaaccacaagcctagcaacaccaaggtggacaagagagtggaacccaagagctgcgacaagacccacacctgtcctccatgtcctgctccagaactgctcggcggaccttccgtgttcctgtttcctccaaagcctaaggacaccctgatgatcagcagaacccctgaagtgacctgcgtggtggtggatgtgtctcacgaggaccccgaagtgaagttcaattggtacgtggacggcgtggaagtgcacaacgccaagaccaagcctagagaggaacagtacaacagcacctacagagtggtgtccgtgctgacagtgctgcaccaggattggctgaacggcaaagagtacaagtgcaaggtgtccaacaaggccctgcctgctcctatcgagaaaaccatcagcaaggccaagggccagcctagggaaccccaggtttacaccctgcctccatgccgcgaggaaatgaccaagaaccaggtgtccctgtggtgcctcgtgaagggcttctacccttccgatatcgccgtggaatgggagagcaatggccagcctgagaacaactacaagacaacccctcctgtgctggacagcgacggctcattcttcctgtacagcaagctgaccgtggacaagtccagatggcagcagggcaacgtgttcagctgtagcgtgctgcacgaagccctgcacagccactacacccagaagtccctgtctctgagccccggcaagtgataaggatccgatctggtactgcatgcacgcaatgctagctgcccctttcccgtcctgggtaccccgagtctcccccgacctcgggtcccaggtatgctcccacctccacctgccccactcaccacctctgctagttccagacacctcccaagcacgcagcaatgcagctcaaaacgcttagcctagccacacccccacgggaaacagcagtgattaacctttagcaataaacgaaagtttaactaagctatactaaccccagggttggtcaatttcgtgccagccacaccctcgagctagcaaaaaaaaaaaaaaaaaaaaaaaaaaaaaagcatatgactaaaaaaaaaaaaaaaaaaaaaaaaaaaaaaaaaaaaaaaaaaaaaaaaaaaaaaaaaaaaaaaaaaaaaa

SEQ ID NO: 854 - RNA, 1937 nt, synthetic construct
  source 1..1937: mol_type = other RNA
agaataaactagtattcttctggtccccacagactcagagagaacccgccaccatggattggatttggagaatcctgttcctcgtgggcgccgctaccggagcccactcccaggtgcatctgacgcagtctgggcctgaggtgaggaagcctgggacctccgtaaaggtctcctgcaaggcccctggaaacacattgaagacttatgatctacactgggtgcgcagcgtccctggacaaggccttcagtggatgggatggataagccatgagggcgacaagaaggtcattgtggaaagattcaaggccaaagtcaccattgattgggacaggtccaccaatacggcctatctccaactgagcggcctcacatctggcgacacggccgtctattattgtgcgaaaggctcaaaacacaggctgcgagattacgctctctacgacgacgacggcgcattgaattgggctgtcgatgttgactacctttcgaacttggaattctggggccaagggaccgccgtcaccgtctcttcagcctctacaaagggccctagcgtgttccctctggctcctagcagcaagtcgacatctggcggaacagccgctctgggctgtctggtcaaggactactttcccgagcctgtgacagtgtcctggaactctggcgctctgacaagcggcgtgcacacatttccagccgtgctgcaaagcagcggcctgtactctctgagcagcgtggtcacagtgccaagctctagcctgggcacccagacctacatctgcaatgtgaaccacaagcctagcaacaccaaggtggacaagagagtggaacccaagagctgcgacaagacccacacctgtcctccatgtcctgctccagaactgctggccggaccttccgtgttcctgtttcctccaaagcctaaggacaccctgatgatcagcagaacccctgaagtgacctgcgtggtggtggatgtgtctcacgaggaccccgaagtgaagttcaattggtacgtggacggcgtggaagtgcacaatgccaagaccaagcctagagaggaacagtacaacagcacctacagagtggtgtccgtgctgaccgtgctgcaccaggattggctgaacggcaaagagtacaagtgcaaggtgtccaacaaggccctgcctctgcctgaggaaaagaccatcagcaaggccaagggccagcctagggaaccccaggtttacacactgcctccaagccgcgaggaaatgaccaagaaccaggtgtccctgacctgcctcgtgaagggcttctacccttccgatatcgccgtggaatgggagagcaatggccagcctgagaacaactacaagacaacccctcctgtgctggacagcgacggctcattcttcctgtacagcaagctgaccgtggacaagtccagatggcagcagggcaacgtgttcagctgtagcgtgctgcacgaagccctgcacagccactacacccagaaaagcctgtctctgagccccggcaaatgataaggatccgatctggtactgcatgcacgcaatgctagctgcccctttcccgtcctgggtaccccgagtctcccccgacctcgggtcccaggtatgctcccacctccacctgccccactcaccacctctgctagttccagacacctcccaagcacgcagcaatgcagctcaaaacgcttagcctagccacacccccacgggaaacagcagtgattaacctttagcaataaacgaaagtttaactaagctatactaaccccagggttggtcaatttcgtgccagccacaccctcgagctagcaaaaaaaaaaaaaaaaaaaaaaaaaaaaaagcatatgactaaaaaaaaaaaaaaaaaaaaaaaaaaaaaaaaaaaaaaaaaaaaaaaaaaaaaaaaaaaaaaaaaaaaaa

SEQ ID NO: 855 - RNA, 1937 nt, synthetic construct
  source 1..1937: mol_type = other RNA
agaataaactagtattcttctggtccccacagactcagagagaacccgccaccatggattggatttggagaatcctgttcctcgtgggcgccgctaccggagcccactcccaggtgcatctgacgcagtctgggcctgaggtgaggaagcctgggacctccgtaaaggtctcctgcaaggcccctggaaacacattgaagacttatgatctacactgggtgcgcagcgtccctggacaaggccttcagtggatgggatggataagccatgagggcgacaagaaggtcattgtggaaagattcaaggccaaagtcaccattgattgggacaggtccaccaatacggcctatctccaactgagcggcctcacatctggcgacacggccgtctattattgtgcgaaaggctcaaaacacaggctgcgagattacgctctctacgacgacgacggcgcattgaattgggctgtcgatgttgactacctttcgaacttggaattctggggccaagggaccgccgtcaccgtctcttcagcctctacaaagggccctagcgtgttccctctggctcctagcagcaagtcgacatctggcggaacagccgctctgggctgtctggtcaaggactactttcccgagcctgtgacagtgtcctggaactctggcgctctgacaagcggcgtgcacacatttccagccgtgctgcaaagcagcggcctgtactctctgagcagcgtggtcacagtgccaagctctagcctgggcacccagacctacatctgcaatgtgaaccacaagcctagcaacaccaaggtggacaagagagtggaacccaagagctgcgacaagacccacacctgtcctccatgtcctgctccagaactgctggccggaccttccgtgttcctgtttcctccaaagcctaaggacaccctgatgatcagcagaacccctgaagtgacctgcgtggtggtggatgtgtctcacgaggaccctgaagtgaagttcaattggtacgtggacggcgtggaagtgcacaacgccaagaccaagcctagagaggaacagtacaacagcacctacagagtggtgtccgtgctgaccgtgctgcaccaggattggctgaacggcaaagagtacaagtgcaaggtgtccaacaaggccctgcctgcccctgaggaaaagaccatcagcaaggccaagggccagcctagggaaccccaggtttacacactgcctccaagccgcgaggaaatgaccaagaaccaggtgtccctgacctgcctcgtgaagggcttctacccttccgatatcgccgtggaatgggagagcaatggccagcctgagaacaactacaagacaacccctcctgtgctggacagcgacggctcattcttcctgtacagcaagctgaccgtggacaagtccagatggcagcagggcaacgtgttcagctgtagcgtgctgcacgaagccctgcacagccactacacccagaaaagcctgtctctgagccccggcaaatgataaggatccgatctggtactgcatgcacgcaatgctagctgcccctttcccgtcctgggtaccccgagtctcccccgacctcgggtcccaggtatgctcccacctccacctgccccactcaccacctctgctagttccagacacctcccaagcacgcagcaatgcagctcaaaacgcttagcctagccacacccccacgggaaacagcagtgattaacctttagcaataaacgaaagtttaactaagctatactaaccccagggttggtcaatttcgtgccagccacaccctcgagctagcaaaaaaaaaaaaaaaaaaaaaaaaaaaaaagcatatgactaaaaaaaaaaaaaaaaaaaaaaaaaaaaaaaaaaaaaaaaaaaaaaaaaaaaaaaaaaaaaaaaaaaaaa

SEQ ID NO: 856 - RNA, 1937 nt, synthetic construct
  source 1..1937: mol_type = other RNA
agaataaactagtattcttctggtccccacagactcagagagaacccgccaccatggattggatttggagaatcctgttcctcgtgggcgccgctaccggagcccactcccaggtgcatctgacgcagtctgggcctgaggtgaggaagcctgggacctccgtaaaggtctcctgcaaggcccctggaaacacattgaagacttatgatctacactgggtgcgcagcgtccctggacaaggccttcagtggatgggatggataagccatgagggcgacaagaaggtcattgtggaaagattcaaggccaaagtcaccattgattgggacaggtccaccaatacggcctatctccaactgagcggcctcacatctggcgacacggccgtctattattgtgcgaaaggctcaaaacacaggctgcgagattacgctctctacgacgacgacggcgcattgaattgggctgtcgatgttgactacctttcgaacttggaattctggggccaagggaccgccgtcaccgtctcttcagcctctacaaagggccctagcgtgttccctctggctcctagcagcaagtcgacatctggcggaacagccgctctgggctgtctggtcaaggactactttcccgagcctgtgacagtgtcctggaactctggcgctctgacaagcggcgtgcacacatttccagccgtgctgcaaagcagcggcctgtactctctgagcagcgtggtcacagtgccaagctctagcctgggcacccagacctacatctgcaatgtgaaccacaagcctagcaacaccaaggtggacaagagagtggaacccaagagctgcgacaagacccacacctgtcctccatgtcctgctccagaactgctggccggaccttccgtgttcctgtttcctccaaagcctaaggacaccctgatgatcagcagaacccctgaagtgacctgcgtggtggtggatgtgtctcacgaggaccctgaagtgaagttcaattggtacgtggacggcgtggaagtgcacaacgccaagaccaagcctagagaggaacagtacaacagcacctacagagtggtgtccgtgctgaccgtgctgcaccaggattggctgaacggcaaagagtacaagtgcaaggtgtccaacaaggccctgcctgcccctatcgaaaagaccatcagcaaggccaagggccagcctagggaaccccaggtttacacactgcctccaagccgcgaggaaatgaccaagaaccaggtgtccctgacctgcctcgtgaagggcttctacccttccgatatcgccgtggaatgggagagcaatggccagcctgagaacaactacaagacaacccctcctgtgctggacagcgacggctcattcttcctgtacagcaagctgaccgtggacaagtccagatggcagcagggcaacgtgttcagctgtagcgtgctgcacgaagccctgcacagccactacacccagaaaagcctgtctctgagccccggcaaatgataaggatccgatctggtactgcatgcacgcaatgctagctgcccctttcccgtcctgggtaccccgagtctcccccgacctcgggtcccaggtatgctcccacctccacctgccccactcaccacctctgctagttccagacacctcccaagcacgcagcaatgcagctcaaaacgcttagcctagccacacccccacgggaaacagcagtgattaacctttagcaataaacgaaagtttaactaagctatactaaccccagggttggtcaatttcgtgccagccacaccctcgagctagcaaaaaaaaaaaaaaaaaaaaaaaaaaaaaagcatatgactaaaaaaaaaaaaaaaaaaaaaaaaaaaaaaaaaaaaaaaaaaaaaaaaaaaaaaaaaaaaaaaaaaaaaa

SEQ ID NO: 857 - RNA, 1937 nt, synthetic construct
  source 1..1937: mol_type = other RNA
agaataaactagtattcttctggtccccacagactcagagagaacccgccaccatggattggatttggagaatcctgttcctcgtgggcgccgctaccggagcccactcccaggtgcatctgacgcagtctgggcctgaggtgaggaagcctgggacctccgtaaaggtctcctgcaaggcccctggaaacacattgaagacttatgatctacactgggtgcgcagcgtccctggacaaggccttcagtggatgggatggataagccatgagggcgacaagaaggtcattgtggaaagattcaaggccaaagtcaccattgattgggacaggtccaccaatacggcctatctccaactgagcggcctcacatctggcgacacggccgtctattattgtgcgaaaggctcaaaacacaggctgcgagattacgctctctacgacgacgacggcgcattgaattgggctgtcgatgttgactacctttcgaacttggaattctggggccaagggaccgccgtcaccgtctcttcagcctctacaaagggccctagcgtgttccctctggctcctagcagcaagtcgacatctggcggaacagccgctctgggctgtctggtcaaggactactttcccgagcctgtgacagtgtcctggaactctggcgctctgacaagcggcgtgcacacatttccagccgtgctgcaaagcagcggcctgtactctctgagcagcgtggtcacagtgccaagctctagcctgggcacccagacctacatctgcaatgtgaaccacaagcctagcaacaccaaggtggacaagagagtggaacccaagagctgcgacaagacccacacctgtcctccatgtcctgctccagaactgctgggcggaccttccgtgttcctgtttcctccaaagcctaaggacaccctgatgatcagcagaacccctgaagtgacctgcgtggtggtggatgtgtctcacgaggaccctgaagtgaagttcaattggtacgtggacggcgtggaagtgcacaacgccaagaccaagcctagagaggaacagtacaacagcacctacagagtggtgtccgtgctgaccgtgctgcaccaggattggctgaacggcaaagagtacaagtgcaaggtgtccaacaaggccctgcctgcccctgaggaaaagaccatcagcaaggccaagggccagcctagggaaccccaggtttacacactgcctccaagccgcgaggaaatgaccaagaaccaggtgtccctgacctgcctcgtgaagggcttctacccttccgatatcgccgtggaatgggagagcaatggccagcctgagaacaactacaagacaacccctcctgtgctggacagcgacggctcattcttcctgtacagcaagctgaccgtggacaagtccagatggcagcagggcaacgtgttcagctgtagcgtgctgcacgaagccctgcacagccactacacccagaaaagcctgtctctgagccccggcaaatgataaggatccgatctggtactgcatgcacgcaatgctagctgcccctttcccgtcctgggtaccccgagtctcccccgacctcgggtcccaggtatgctcccacctccacctgccccactcaccacctctgctagttccagacacctcccaagcacgcagcaatgcagctcaaaacgcttagcctagccacacccccacgggaaacagcagtgattaacctttagcaataaacgaaagtttaactaagctatactaaccccagggttggtcaatttcgtgccagccacaccctcgagctagcaaaaaaaaaaaaaaaaaaaaaaaaaaaaaagcatatgactaaaaaaaaaaaaaaaaaaaaaaaaaaaaaaaaaaaaaaaaaaaaaaaaaaaaaaaaaaaaaaaaaaaaaa

SEQ ID NO: 858 - RNA, 1937 nt, synthetic construct
  source 1..1937: mol_type = other RNA
agaataaactagtattcttctggtccccacagactcagagagaacccgccaccatggattggatttggagaatcctgttcctcgtgggcgccgctaccggagcccactcccaggtgcatctgacgcagtctgggcctgaggtgaggaagcctgggacctccgtaaaggtctcctgcaaggcccctggaaacacattgaagacttatgatctacactgggtgcgcagcgtccctggacaaggccttcagtggatgggatggataagccatgagggcgacaagaaggtcattgtggaaagattcaaggccaaagtcaccattgattgggacaggtccaccaatacggcctatctccaactgagcggcctcacatctggcgacacggccgtctattattgtgcgaaaggctcaaaacacaggctgcgagattacgctctctacgacgacgacggcgcattgaattgggctgtcgatgttgactacctttcgaacttggaattctggggccaagggaccgccgtcaccgtctcttcagcctctacaaagggccctagcgtgttccctctggctcctagcagcaagtcgacatctggcggaacagccgctctgggctgtctggtcaaggactactttcccgagcctgtgacagtgtcctggaactctggcgctctgacaagcggcgtgcacacatttccagccgtgctgcaaagcagcggcctgtactctctgagcagcgtggtcacagtgccaagctctagcctgggcacccagacctacatctgcaatgtgaaccacaagcctagcaacaccaaggtggacaagagagtggaacccaagagctgcgacaagacccacacctgtcctccatgtcctgctccagaactgctggccggaccttccgtgttcctgtttcctccaaagcctaaggacaccctgatgatcagcagaacccctgaagtgacctgcgtggtggtggatgtgtctcacgaggaccccgaagtgaagttcaattggtacgtggacggcgtggaagtgcacaatgccaagaccaagcctagagaggaacagtacaacagcacctacagagtggtgtccgtgctgaccgtgctgcaccaggattggctgaacggcaaagagtacaagtgcaaggtgtccaacaaggccctgcctctgcctgaggaaaagaccatcagcaaggccaagggccagcctagggaaccccaagtctgtacactgcctcctagccgcgaggaaatgaccaagaaccaggtgtccctgagctgcgccgtgaagggcttttacccttccgatatcgccgtggaatgggagagcaatggccagcctgagaacaactacaagacaacccctcctgtgctggacagcgacggctcattcttcctggtgtccaagctgacagtggacaagagcagatggcagcagggcaacgtgttcagctgctctgtgctgcacgaagccctgcacagccactacacccagaagtccctgtctctgagccccggcaagtgataaggatccgatctggtactgcatgcacgcaatgctagctgcccctttcccgtcctgggtaccccgagtctcccccgacctcgggtcccaggtatgctcccacctccacctgccccactcaccacctctgctagttccagacacctcccaagcacgcagcaatgcagctcaaaacgcttagcctagccacacccccacgggaaacagcagtgattaacctttagcaataaacgaaagtttaactaagctatactaaccccagggttggtcaatttcgtgccagccacaccctcgagctagcaaaaaaaaaaaaaaaaaaaaaaaaaaaaaagcatatgactaaaaaaaaaaaaaaaaaaaaaaaaaaaaaaaaaaaaaaaaaaaaaaaaaaaaaaaaaaaaaaaaaaaaaa

SEQ ID NO: 859 - RNA, 1937 nt, synthetic construct
  source 1..1937: mol_type = other RNA
agaataaactagtattcttctggtccccacagactcagagagaacccgccaccatggattggatttggagaatcctgttcctcgtgggcgccgctaccggagcccactcccaggtgcatctgacgcagtctgggcctgaggtgaggaagcctgggacctccgtaaaggtctcctgcaaggcccctggaaacacattgaagacttatgatctacactgggtgcgcagcgtccctggacaaggccttcagtggatgggatggataagccatgagggcgacaagaaggtcattgtggaaagattcaaggccaaagtcaccattgattgggacaggtccaccaatacggcctatctccaactgagcggcctcacatctggcgacacggccgtctattattgtgcgaaaggctcaaaacacaggctgcgagattacgctctctacgacgacgacggcgcattgaattgggctgtcgatgttgactacctttcgaacttggaattctggggccaagggaccgccgtcaccgtctcttcagcctctacaaagggccctagcgtgttccctctggctcctagcagcaagtcgacatctggcggaacagccgctctgggctgtctggtcaaggactactttcccgagcctgtgacagtgtcctggaactctggcgctctgacaagcggcgtgcacacatttccagccgtgctgcaaagcagcggcctgtactctctgagcagcgtggtcacagtgccaagctctagcctgggcacccagacctacatctgcaatgtgaaccacaagcctagcaacaccaaggtggacaagagagtggaacccaagagctgcgacaagacccacacctgtcctccatgtcctgctccagaactgctggccggaccttccgtgttcctgtttcctccaaagcctaaggacaccctgatgatcagcagaacccctgaagtgacctgcgtggtggtggatgtgtctcacgaggaccctgaagtgaagttcaattggtacgtggacggcgtggaagtgcacaacgccaagaccaagcctagagaggaacagtacaacagcacctacagagtggtgtccgtgctgaccgtgctgcaccaggattggctgaacggcaaagagtacaagtgcaaggtgtccaacaaggccctgcctgcccctgaggaaaagaccatcagcaaggccaagggccagcctagggaaccccaagtctgtacactgcctcctagccgcgaggaaatgaccaagaaccaggtgtccctgagctgcgccgtgaagggcttttacccttccgatatcgccgtggaatgggagagcaatggccagcctgagaacaactacaagacaacccctcctgtgctggacagcgacggctcattcttcctggtgtccaagctgacagtggacaagagcagatggcagcagggcaacgtgttcagctgctctgtgctgcacgaagccctgcacagccactacacccagaagtccctgtctctgagccccggcaagtgataaggatccgatctggtactgcatgcacgcaatgctagctgcccctttcccgtcctgggtaccccgagtctcccccgacctcgggtcccaggtatgctcccacctccacctgccccactcaccacctctgctagttccagacacctcccaagcacgcagcaatgcagctcaaaacgcttagcctagccacacccccacgggaaacagcagtgattaacctttagcaataaacgaaagtttaactaagctatactaaccccagggttggtcaatttcgtgccagccacaccctcgagctagcaaaaaaaaaaaaaaaaaaaaaaaaaaaaaagcatatgactaaaaaaaaaaaaaaaaaaaaaaaaaaaaaaaaaaaaaaaaaaaaaaaaaaaaaaaaaaaaaaaaaaaaaa

SEQ ID NO: 860 - RNA, 1937 nt, synthetic construct
  source 1..1937: mol_type = other RNA
agaataaactagtattcttctggtccccacagactcagagagaacccgccaccatggattggatttggagaatcctgttcctcgtgggcgccgctaccggagcccactcccaggtgcatctgacgcagtctgggcctgaggtgaggaagcctgggacctccgtaaaggtctcctgcaaggcccctggaaacacattgaagacttatgatctacactgggtgcgcagcgtccctggacaaggccttcagtggatgggatggataagccatgagggcgacaagaaggtcattgtggaaagattcaaggccaaagtcaccattgattgggacaggtccaccaatacggcctatctccaactgagcggcctcacatctggcgacacggccgtctattattgtgcgaaaggctcaaaacacaggctgcgagattacgctctctacgacgacgacggcgcattgaattgggctgtcgatgttgactacctttcgaacttggaattctggggccaagggaccgccgtcaccgtctcttcagcctctacaaagggccctagcgtgttccctctggctcctagcagcaagtcgacatctggcggaacagccgctctgggctgtctggtcaaggactactttcccgagcctgtgacagtgtcctggaactctggcgctctgacaagcggcgtgcacacatttccagccgtgctgcaaagcagcggcctgtactctctgagcagcgtggtcacagtgccaagctctagcctgggcacccagacctacatctgcaatgtgaaccacaagcctagcaacaccaaggtggacaagagagtggaacccaagagctgcgacaagacccacacctgtcctccatgtcctgctccagaactgctggccggaccttccgtgttcctgtttcctccaaagcctaaggacaccctgatgatcagcagaacccctgaagtgacctgcgtggtggtggatgtgtctcacgaggaccctgaagtgaagttcaattggtacgtggacggcgtggaagtgcacaacgccaagaccaagcctagagaggaacagtacaacagcacctacagagtggtgtccgtgctgaccgtgctgcaccaggattggctgaacggcaaagagtacaagtgcaaggtgtccaacaaggccctgcctgcccctatcgaaaagaccatcagcaaggccaagggccagcctagggaaccccaagtctgtacactgcctcctagccgcgaggaaatgaccaagaaccaggtgtccctgagctgcgccgtgaagggcttttacccttccgatatcgccgtggaatgggagagcaatggccagcctgagaacaactacaagacaacccctcctgtgctggacagcgacggctcattcttcctggtgtccaagctgacagtggacaagagcagatggcagcagggcaacgtgttcagctgctctgtgctgcacgaagccctgcacagccactacacccagaagtccctgtctctgagccccggcaagtgataaggatccgatctggtactgcatgcacgcaatgctagctgcccctttcccgtcctgggtaccccgagtctcccccgacctcgggtcccaggtatgctcccacctccacctgccccactcaccacctctgctagttccagacacctcccaagcacgcagcaatgcagctcaaaacgcttagcctagccacacccccacgggaaacagcagtgattaacctttagcaataaacgaaagtttaactaagctatactaaccccagggttggtcaatttcgtgccagccacaccctcgagctagcaaaaaaaaaaaaaaaaaaaaaaaaaaaaaagcatatgactaaaaaaaaaaaaaaaaaaaaaaaaaaaaaaaaaaaaaaaaaaaaaaaaaaaaaaaaaaaaaaaaaaaaaa

SEQ ID NO: 861 - RNA, 1937 nt, synthetic construct
  source 1..1937: mol_type = other RNA
agaataaactagtattcttctggtccccacagactcagagagaacccgccaccatggattggatttggagaatcctgttcctcgtgggcgccgctaccggagcccactcccaggtgcatctgacgcagtctgggcctgaggtgaggaagcctgggacctccgtaaaggtctcctgcaaggcccctggaaacacattgaagacttatgatctacactgggtgcgcagcgtccctggacaaggccttcagtggatgggatggataagccatgagggcgacaagaaggtcattgtggaaagattcaaggccaaagtcaccattgattgggacaggtccaccaatacggcctatctccaactgagcggcctcacatctggcgacacggccgtctattattgtgcgaaaggctcaaaacacaggctgcgagattacgctctctacgacgacgacggcgcattgaattgggctgtcgatgttgactacctttcgaacttggaattctggggccaagggaccgccgtcaccgtctcttcagcctctacaaagggccctagcgtgttccctctggctcctagcagcaagtcgacatctggcggaacagccgctctgggctgtctggtcaaggactactttcccgagcctgtgacagtgtcctggaactctggcgctctgacaagcggcgtgcacacatttccagccgtgctgcaaagcagcggcctgtactctctgagcagcgtggtcacagtgccaagctctagcctgggcacccagacctacatctgcaatgtgaaccacaagcctagcaacaccaaggtggacaagagagtggaacccaagagctgcgacaagacccacacctgtcctccatgtcctgctccagaactgctgggcggaccttccgtgttcctgtttcctccaaagcctaaggacaccctgatgatcagcagaacccctgaagtgacctgcgtggtggtggatgtgtctcacgaggaccctgaagtgaagttcaattggtacgtggacggcgtggaagtgcacaacgccaagaccaagcctagagaggaacagtacaacagcacctacagagtggtgtccgtgctgaccgtgctgcaccaggattggctgaacggcaaagagtacaagtgcaaggtgtccaacaaggccctgcctgcccctgaggaaaagaccatcagcaaggccaagggccagcctagggaaccccaagtctgtacactgcctcctagccgcgaggaaatgaccaagaaccaggtgtccctgagctgcgccgtgaagggcttttacccttccgatatcgccgtggaatgggagagcaatggccagcctgagaacaactacaagacaacccctcctgtgctggacagcgacggctcattcttcctggtgtccaagctgacagtggacaagagcagatggcagcagggcaacgtgttcagctgctctgtgctgcacgaagccctgcacagccactacacccagaagtccctgtctctgagccccggcaagtgataaggatccgatctggtactgcatgcacgcaatgctagctgcccctttcccgtcctgggtaccccgagtctcccccgacctcgggtcccaggtatgctcccacctccacctgccccactcaccacctctgctagttccagacacctcccaagcacgcagcaatgcagctcaaaacgcttagcctagccacacccccacgggaaacagcagtgattaacctttagcaataaacgaaagtttaactaagctatactaaccccagggttggtcaatttcgtgccagccacaccctcgagctagcaaaaaaaaaaaaaaaaaaaaaaaaaaaaaagcatatgactaaaaaaaaaaaaaaaaaaaaaaaaaaaaaaaaaaaaaaaaaaaaaaaaaaaaaaaaaaaaaaaaaaaaaa

SEQ ID NO: 862 - RNA, 1937 nt, synthetic construct
  source 1..1937: mol_type = other RNA
agaataaactagtattcttctggtccccacagactcagagagaacccgccaccatggattggatttggagaatcctgttcctcgtgggcgccgctaccggagcccactcccaggtgcatctgacgcagtctgggcctgaggtgaggaagcctgggacctccgtaaaggtctcctgcaaggcccctggaaacacattgaagacttatgatctacactgggtgcgcagcgtccctggacaaggccttcagtggatgggatggataagccatgagggcgacaagaaggtcattgtggaaagattcaaggccaaagtcaccattgattgggacaggtccaccaatacggcctatctccaactgagcggcctcacatctggcgacacggccgtctattattgtgcgaaaggctcaaaacacaggctgcgagattacgctctctacgacgacgacggcgcattgaattgggctgtcgatgttgactacctttcgaacttggaattctggggccaagggaccgccgtcaccgtctcttcagcctctacaaagggccctagcgtgttccctctggctcctagcagcaagtcgacatctggcggaacagccgctctgggctgtctggtcaaggactactttcccgagcctgtgacagtgtcctggaactctggcgctctgacaagcggcgtgcacacatttccagccgtgctgcaaagcagcggcctgtactctctgagcagcgtggtcacagtgccaagctctagcctgggcacccagacctacatctgcaatgtgaaccacaagcctagcaacaccaaggtggacaagagagtggaacccaagagctgcgacaagacccacacctgtcctccatgtcctgctccagaactgctggccggaccttccgtgttcctgtttcctccaaagcctaaggacaccctgatgatcagcagaacccctgaagtgacctgcgtggtggtggatgtgtctcacgaggaccccgaagtgaagttcaattggtacgtggacggcgtggaagtgcacaatgccaagaccaagcctagagaggaacagtacaacagcacctacagagtggtgtccgtgctgaccgtgctgcaccaggattggctgaacggcaaagagtacaagtgcaaggtgtccaacaaggccctgcctctgcctgaggaaaagaccatcagcaaggccaagggccagcctagggaaccccaggtttacaccctgcctccatgccgcgaggaaatgaccaagaaccaggtgtccctgtggtgcctcgtgaagggcttctacccttccgatatcgccgtggaatgggagagcaatggccagcctgagaacaactacaagacaacccctcctgtgctggacagcgacggctcattcttcctgtacagcaagctgaccgtggacaagtccagatggcagcagggcaacgtgttcagctgtagcgtgctgcacgaagccctgcacagccactacacccagaagtccctgtctctgagccccggcaagtgataaggatccgatctggtactgcatgcacgcaatgctagctgcccctttcccgtcctgggtaccccgagtctcccccgacctcgggtcccaggtatgctcccacctccacctgccccactcaccacctctgctagttccagacacctcccaagcacgcagcaatgcagctcaaaacgcttagcctagccacacccccacgggaaacagcagtgattaacctttagcaataaacgaaagtttaactaagctatactaaccccagggttggtcaatttcgtgccagccacaccctcgagctagcaaaaaaaaaaaaaaaaaaaaaaaaaaaaaagcatatgactaaaaaaaaaaaaaaaaaaaaaaaaaaaaaaaaaaaaaaaaaaaaaaaaaaaaaaaaaaaaaaaaaaaaaa

SEQ ID NO: 863 - RNA, 1937 nt, synthetic construct
  source 1..1937: mol_type = other RNA
agaataaactagtattcttctggtccccacagactcagagagaacccgccaccatggattggatttggagaatcctgttcctcgtgggcgccgctaccggagcccactcccaggtgcatctgacgcagtctgggcctgaggtgaggaagcctgggacctccgtaaaggtctcctgcaaggcccctggaaacacattgaagacttatgatctacactgggtgcgcagcgtccctggacaaggccttcagtggatgggatggataagccatgagggcgacaagaaggtcattgtggaaagattcaaggccaaagtcaccattgattgggacaggtccaccaatacggcctatctccaactgagcggcctcacatctggcgacacggccgtctattattgtgcgaaaggctcaaaacacaggctgcgagattacgctctctacgacgacgacggcgcattgaattgggctgtcgatgttgactacctttcgaacttggaattctggggccaagggaccgccgtcaccgtctcttcagcctctacaaagggccctagcgtgttccctctggctcctagcagcaagtcgacatctggcggaacagccgctctgggctgtctggtcaaggactactttcccgagcctgtgacagtgtcctggaactctggcgctctgacaagcggcgtgcacacatttccagccgtgctgcaaagcagcggcctgtactctctgagcagcgtggtcacagtgccaagctctagcctgggcacccagacctacatctgcaatgtgaaccacaagcctagcaacaccaaggtggacaagagagtggaacccaagagctgcgacaagacccacacctgtcctccatgtcctgctccagaactgctggccggaccttccgtgttcctgtttcctccaaagcctaaggacaccctgatgatcagcagaacccctgaagtgacctgcgtggtggtggatgtgtctcacgaggaccctgaagtgaagttcaattggtacgtggacggcgtggaagtgcacaacgccaagaccaagcctagagaggaacagtacaacagcacctacagagtggtgtccgtgctgaccgtgctgcaccaggattggctgaacggcaaagagtacaagtgcaaggtgtccaacaaggccctgcctgcccctgaggaaaagaccatcagcaaggccaagggccagcctagggaaccccaggtttacaccctgcctccatgccgcgaggaaatgaccaagaaccaggtgtccctgtggtgcctcgtgaagggcttctacccttccgatatcgccgtggaatgggagagcaatggccagcctgagaacaactacaagacaacccctcctgtgctggacagcgacggctcattcttcctgtacagcaagctgaccgtggacaagtccagatggcagcagggcaacgtgttcagctgtagcgtgctgcacgaagccctgcacagccactacacccagaagtccctgtctctgagccccggcaagtgataaggatccgatctggtactgcatgcacgcaatgctagctgcccctttcccgtcctgggtaccccgagtctcccccgacctcgggtcccaggtatgctcccacctccacctgccccactcaccacctctgctagttccagacacctcccaagcacgcagcaatgcagctcaaaacgcttagcctagccacacccccacgggaaacagcagtgattaacctttagcaataaacgaaagtttaactaagctatactaaccccagggttggtcaatttcgtgccagccacaccctcgagctagcaaaaaaaaaaaaaaaaaaaaaaaaaaaaaagcatatgactaaaaaaaaaaaaaaaaaaaaaaaaaaaaaaaaaaaaaaaaaaaaaaaaaaaaaaaaaaaaaaaaaaaaaa

SEQ ID NO: 864 - RNA, 1937 nt, synthetic construct
  source 1..1937: mol_type = other RNA
agaataaactagtattcttctggtccccacagactcagagagaacccgccaccatggattggatttggagaatcctgttcctcgtgggcgccgctaccggagcccactcccaggtgcatctgacgcagtctgggcctgaggtgaggaagcctgggacctccgtaaaggtctcctgcaaggcccctggaaacacattgaagacttatgatctacactgggtgcgcagcgtccctggacaaggccttcagtggatgggatggataagccatgagggcgacaagaaggtcattgtggaaagattcaaggccaaagtcaccattgattgggacaggtccaccaatacggcctatctccaactgagcggcctcacatctggcgacacggccgtctattattgtgcgaaaggctcaaaacacaggctgcgagattacgctctctacgacgacgacggcgcattgaattgggctgtcgatgttgactacctttcgaacttggaattctggggccaagggaccgccgtcaccgtctcttcagcctctacaaagggccctagcgtgttccctctggctcctagcagcaagtcgacatctggcggaacagccgctctgggctgtctggtcaaggactactttcccgagcctgtgacagtgtcctggaactctggcgctctgacaagcggcgtgcacacatttccagccgtgctgcaaagcagcggcctgtactctctgagcagcgtggtcacagtgccaagctctagcctgggcacccagacctacatctgcaatgtgaaccacaagcctagcaacaccaaggtggacaagagagtggaacccaagagctgcgacaagacccacacctgtcctccatgtcctgctccagaactgctggccggaccttccgtgttcctgtttcctccaaagcctaaggacaccctgatgatcagcagaacccctgaagtgacctgcgtggtggtggatgtgtctcacgaggaccctgaagtgaagttcaattggtacgtggacggcgtggaagtgcacaacgccaagaccaagcctagagaggaacagtacaacagcacctacagagtggtgtccgtgctgaccgtgctgcaccaggattggctgaacggcaaagagtacaagtgcaaggtgtccaacaaggccctgcctgcccctatcgaaaagaccatcagcaaggccaagggccagcctagggaaccccaggtttacaccctgcctccatgccgcgaggaaatgaccaagaaccaggtgtccctgtggtgcctcgtgaagggcttctacccttccgatatcgccgtggaatgggagagcaatggccagcctgagaacaactacaagacaacccctcctgtgctggacagcgacggctcattcttcctgtacagcaagctgaccgtggacaagtccagatggcagcagggcaacgtgttcagctgtagcgtgctgcacgaagccctgcacagccactacacccagaagtccctgtctctgagccccggcaagtgataaggatccgatctggtactgcatgcacgcaatgctagctgcccctttcccgtcctgggtaccccgagtctcccccgacctcgggtcccaggtatgctcccacctccacctgccccactcaccacctctgctagttccagacacctcccaagcacgcagcaatgcagctcaaaacgcttagcctagccacacccccacgggaaacagcagtgattaacctttagcaataaacgaaagtttaactaagctatactaaccccagggttggtcaatttcgtgccagccacaccctcgagctagcaaaaaaaaaaaaaaaaaaaaaaaaaaaaaagcatatgactaaaaaaaaaaaaaaaaaaaaaaaaaaaaaaaaaaaaaaaaaaaaaaaaaaaaaaaaaaaaaaaaaaaaaa

SEQ ID NO: 865 - RNA, 1937 nt, synthetic construct
  source 1..1937: mol_type = other RNA
agaataaactagtattcttctggtccccacagactcagagagaacccgccaccatggattggatttggagaatcctgttcctcgtgggcgccgctaccggagcccactcccaggtgcatctgacgcagtctgggcctgaggtgaggaagcctgggacctccgtaaaggtctcctgcaaggcccctggaaacacattgaagacttatgatctacactgggtgcgcagcgtccctggacaaggccttcagtggatgggatggataagccatgagggcgacaagaaggtcattgtggaaagattcaaggccaaagtcaccattgattgggacaggtccaccaatacggcctatctccaactgagcggcctcacatctggcgacacggccgtctattattgtgcgaaaggctcaaaacacaggctgcgagattacgctctctacgacgacgacggcgcattgaattgggctgtcgatgttgactacctttcgaacttggaattctggggccaagggaccgccgtcaccgtctcttcagcctctacaaagggccctagcgtgttccctctggctcctagcagcaagtcgacatctggcggaacagccgctctgggctgtctggtcaaggactactttcccgagcctgtgacagtgtcctggaactctggcgctctgacaagcggcgtgcacacatttccagccgtgctgcaaagcagcggcctgtactctctgagcagcgtggtcacagtgccaagctctagcctgggcacccagacctacatctgcaatgtgaaccacaagcctagcaacaccaaggtggacaagagagtggaacccaagagctgcgacaagacccacacctgtcctccatgtcctgctccagaactgctgggcggaccttccgtgttcctgtttcctccaaagcctaaggacaccctgatgatcagcagaacccctgaagtgacctgcgtggtggtggatgtgtctcacgaggaccctgaagtgaagttcaattggtacgtggacggcgtggaagtgcacaacgccaagaccaagcctagagaggaacagtacaacagcacctacagagtggtgtccgtgctgaccgtgctgcaccaggattggctgaacggcaaagagtacaagtgcaaggtgtccaacaaggccctgcctgcccctgaggaaaagaccatcagcaaggccaagggccagcctagggaaccccaggtttacaccctgcctccatgccgcgaggaaatgaccaagaaccaggtgtccctgtggtgcctcgtgaagggcttctacccttccgatatcgccgtggaatgggagagcaatggccagcctgagaacaactacaagacaacccctcctgtgctggacagcgacggctcattcttcctgtacagcaagctgaccgtggacaagtccagatggcagcagggcaacgtgttcagctgtagcgtgctgcacgaagccctgcacagccactacacccagaagtccctgtctctgagccccggcaagtgataaggatccgatctggtactgcatgcacgcaatgctagctgcccctttcccgtcctgggtaccccgagtctcccccgacctcgggtcccaggtatgctcccacctccacctgccccactcaccacctctgctagttccagacacctcccaagcacgcagcaatgcagctcaaaacgcttagcctagccacacccccacgggaaacagcagtgattaacctttagcaataaacgaaagtttaactaagctatactaaccccagggttggtcaatttcgtgccagccacaccctcgagctagcaaaaaaaaaaaaaaaaaaaaaaaaaaaaaagcatatgactaaaaaaaaaaaaaaaaaaaaaaaaaaaaaaaaaaaaaaaaaaaaaaaaaaaaaaaaaaaaaaaaaaaaaa

SEQ ID NO: 866 - RNA, 1937 nt, synthetic construct
  source 1..1937: mol_type = other RNA
agaataaactagtattcttctggtccccacagactcagagagaacccgccaccatggattggatttggagaatcctgttcctcgtgggcgccgctaccggagcccactcccaggtgcatctgacgcagtctgggcctgaggtgaggaagcctgggacctccgtaaaggtctcctgcaaggcccctggaaacacattgaagacttatgatctacactgggtgcgcagcgtccctggacaaggccttcagtggatgggatggataagccatgagggcgacaagaaggtcattgtggaaagattcaaggccaaagtcaccattgattgggacaggtccaccaatacggcctatctccaactgagcggcctcacatctggcgacacggccgtctattattgtgcgaaaggctcaaaacacaggctgcgagattacgctctctacgacgacgacggcgcattgaattgggctgtcgatgttgactacctttcgaacttggaattctggggccaagggaccgccgtcaccgtctcttcagcctctacaaagggccctagcgtgttccctctggctcctagcagcaagtcgacatctggcggaacagccgctctgggctgtctggtcaaggactactttcccgagcctgtgacagtgtcctggaactctggcgctctgacaagcggcgtgcacacatttccagccgtgctgcaaagcagcggcctgtactctctgagcagcgtggtcacagtgccaagctctagcctgggcacccagacctacatctgcaatgtgaaccacaagcctagcaacaccaaggtggacaagaaggtggaacccaagagctgcgacaagacccacacctgtcctccatgtcctgctccagaactgctcggcggaccttccgtgttcctgtttcctccaaagcctaaggacaccctgatgatcagcagaacccctgaagtgacctgcgtggtggtggatgtgtctcacgaggaccccgaagtgaagttcaattggtacgtggacggcgtggaagtgcacaacgccaagaccaagcctagagaggaacagtacaacagcacctacagagtggtgtccgtgctgacagtgctgcaccaggattggctgaacggcaaagagtacaagtgcaaggtgtccaacaaggccctgcctgctcctatcgagaaaaccatcagcaaggccaagggccagcctagggaaccccaggtttacacactgcctccaagccgcgaggaaatgaccaagaaccaggtgtccctgacctgcctcgtgaagggcttctacccttccgatatcgccgtggaatgggagagcaatggccagcctgagaacaactacaagacaacccctcctgtgctggacagcgacggctcattcttcctgtacagcaagctgactgtggataagtcccggtggcagcagggcaacgtgttcagctgttctgtgatgcacgaagccctgcacaaccactacacccagaaaagcctgtctctgagccccggcaagtgataaggatccgatctggtactgcatgcacgcaatgctagctgcccctttcccgtcctgggtaccccgagtctcccccgacctcgggtcccaggtatgctcccacctccacctgccccactcaccacctctgctagttccagacacctcccaagcacgcagcaatgcagctcaaaacgcttagcctagccacacccccacgggaaacagcagtgattaacctttagcaataaacgaaagtttaactaagctatactaaccccagggttggtcaatttcgtgccagccacaccctcgagctagcaaaaaaaaaaaaaaaaaaaaaaaaaaaaaagcatatgactaaaaaaaaaaaaaaaaaaaaaaaaaaaaaaaaaaaaaaaaaaaaaaaaaaaaaaaaaaaaaaaaaaaaaa

SEQ ID NO: 867 - RNA, 1937 nt, synthetic construct
  source 1..1937: mol_type = other RNA
agaataaactagtattcttctggtccccacagactcagagagaacccgccaccatggattggatttggagaatcctgttcctcgtgggcgccgctaccggagcccactcccaggtgcatctgacgcagtctgggcctgaggtgaggaagcctgggacctccgtaaaggtctcctgcaaggcccctggaaacacattgaagacttatgatctacactgggtgcgcagcgtccctggacaaggccttcagtggatgggatggataagccatgagggcgacaagaaggtcattgtggaaagattcaaggccaaagtcaccattgattgggacaggtccaccaatacggcctatctccaactgagcggcctcacatctggcgacacggccgtctattattgtgcgaaaggctcaaaacacaggctgcgagattacgctctctacgacgacgacggcgcattgaattgggctgtcgatgttgactacctttcgaacttggaattctggggccaagggaccgccgtcaccgtctcttcagcctctacaaagggccctagcgtgttccctctggctcctagcagcaagtcgacatctggcggaacagccgctctgggctgtctggtcaaggactactttcccgagcctgtgacagtgtcctggaactctggcgctctgacaagcggcgtgcacacatttccagccgtgctgcaaagcagcggcctgtactctctgagcagcgtggtcacagtgccaagctctagcctgggcacccagacctacatctgcaatgtgaaccacaagcctagcaacaccaaggtggacaagaaggtggaacccaagagctgcgacaagacccacacctgtcctccatgtcctgctccagaactgctcggcggaccttccgtgttcctgtttcctccaaagcctaaggacaccctgatgatcagcagaacccctgaagtgacctgcgtggtggtggatgtgtctcacgaggaccccgaagtgaagttcaattggtacgtggacggcgtggaagtgcacaacgccaagaccaagcctagagaggaacagtacaacagcacctacagagtggtgtccgtgctgacagtgctgcaccaggattggctgaacggcaaagagtacaagtgcaaggtgtccaacaaggccctgcctgctcctatcgagaaaaccatcagcaaggccaagggccagcctagggaaccccaggtttacacactgcctccaagccgcgaggaaatgaccaagaaccaggtgtccctgacctgcctcgtgaagggcttctacccttccgatatcgccgtggaatgggagagcaatggccagcctgagaacaactacaagacaacccctcctgtgctggacagcgacggctcattcttcctgtacagcaagctgaccgtggacaagtccagatggcagcagggcaacgtgttcagctgtagcgtgctgcacgaagccctgcacagccactacacccagaaaagcctgtctctgagccccggcaaatgataaggatccgatctggtactgcatgcacgcaatgctagctgcccctttcccgtcctgggtaccccgagtctcccccgacctcgggtcccaggtatgctcccacctccacctgccccactcaccacctctgctagttccagacacctcccaagcacgcagcaatgcagctcaaaacgcttagcctagccacacccccacgggaaacagcagtgattaacctttagcaataaacgaaagtttaactaagctatactaaccccagggttggtcaatttcgtgccagccacaccctcgagctagcaaaaaaaaaaaaaaaaaaaaaaaaaaaaaagcatatgactaaaaaaaaaaaaaaaaaaaaaaaaaaaaaaaaaaaaaaaaaaaaaaaaaaaaaaaaaaaaaaaaaaaaaa

SEQ ID NO: 868 - RNA, 1937 nt, synthetic construct
  source 1..1937: mol_type = other RNA
agaataaactagtattcttctggtccccacagactcagagagaacccgccaccatggattggatttggagaatcctgttcctcgtgggcgccgctaccggagcccactcccaggtgcatctgacgcagtctgggcctgaggtgaggaagcctgggacctccgtaaaggtctcctgcaaggcccctggaaacacattgaagacttatgatctacactgggtgcgcagcgtccctggacaaggccttcagtggatgggatggataagccatgagggcgacaagaaggtcattgtggaaagattcaaggccaaagtcaccattgattgggacaggtccaccaatacggcctatctccaactgagcggcctcacatctggcgacacggccgtctattattgtgcgaaaggctcaaaacacaggctgcgagattacgctctctacgacgacgacggcgcattgaattgggctgtcgatgttgactacctttcgaacttggaattctggggccaagggaccgccgtcaccgtctcttcagcctctacaaagggccctagcgtgttccctctggctcctagcagcaagtcgacatctggcggaacagccgctctgggctgtctggtcaaggactactttcccgagcctgtgacagtgtcctggaactctggcgctctgacaagcggcgtgcacacatttccagccgtgctgcaaagcagcggcctgtactctctgagcagcgtggtcacagtgccaagctctagcctgggcacccagacctacatctgcaatgtgaaccacaagcctagcaacaccaaggtggacaagaaggtggaacccaagagctgcgacaagacccacacctgtcctccatgtcctgctccagaactgctcggcggaccttccgtgttcctgtttcctccaaagcctaaggacaccctgatgatcagcagaacccctgaagtgacctgcgtggtggtggatgtgtctcacgaggaccccgaagtgaagttcaattggtacgtggacggcgtggaagtgcacaacgccaagaccaagcctagagaggaacagtacaacagcacctacagagtggtgtccgtgctgacagtgctgcaccaggattggctgaacggcaaagagtacaagtgcaaggtgtccaacaaggccctgcctgctcctatcgagaaaaccatcagcaaggccaagggccagcctagggaaccccaagtctgtacactgcctcctagccgcgaggaaatgaccaagaaccaggtgtccctgagctgcgccgtgaagggcttttacccttccgatatcgccgtggaatgggagagcaatggccagcctgagaacaactacaagacaacccctcctgtgctggacagcgacggctcattcttcctggtgtccaagctgacagtggacaagagcagatggcagcagggcaacgtgttcagctgctctgtgctgcacgaagccctgcacagccactacacccagaagtccctgtctctgagccccggcaagtgataaggatccgatctggtactgcatgcacgcaatgctagctgcccctttcccgtcctgggtaccccgagtctcccccgacctcgggtcccaggtatgctcccacctccacctgccccactcaccacctctgctagttccagacacctcccaagcacgcagcaatgcagctcaaaacgcttagcctagccacacccccacgggaaacagcagtgattaacctttagcaataaacgaaagtttaactaagctatactaaccccagggttggtcaatttcgtgccagccacaccctcgagctagcaaaaaaaaaaaaaaaaaaaaaaaaaaaaaagcatatgactaaaaaaaaaaaaaaaaaaaaaaaaaaaaaaaaaaaaaaaaaaaaaaaaaaaaaaaaaaaaaaaaaaaaaa

SEQ ID NO: 869 - RNA, 1937 nt, synthetic construct
  source 1..1937: mol_type = other RNA
agaataaactagtattcttctggtccccacagactcagagagaacccgccaccatggattggatttggagaatcctgttcctcgtgggcgccgctaccggagcccactcccaggtgcatctgacgcagtctgggcctgaggtgaggaagcctgggacctccgtaaaggtctcctgcaaggcccctggaaacacattgaagacttatgatctacactgggtgcgcagcgtccctggacaaggccttcagtggatgggatggataagccatgagggcgacaagaaggtcattgtggaaagattcaaggccaaagtcaccattgattgggacaggtccaccaatacggcctatctccaactgagcggcctcacatctggcgacacggccgtctattattgtgcgaaaggctcaaaacacaggctgcgagattacgctctctacgacgacgacggcgcattgaattgggctgtcgatgttgactacctttcgaacttggaattctggggccaagggaccgccgtcaccgtctcttcagcctctacaaagggccctagcgtgttccctctggctcctagcagcaagtcgacatctggcggaacagccgctctgggctgtctggtcaaggactactttcccgagcctgtgacagtgtcctggaactctggcgctctgacaagcggcgtgcacacatttccagccgtgctgcaaagcagcggcctgtactctctgagcagcgtggtcacagtgccaagctctagcctgggcacccagacctacatctgcaatgtgaaccacaagcctagcaacaccaaggtggacaagaaggtggaacccaagagctgcgacaagacccacacctgtcctccatgtcctgctccagaactgctcggcggaccttccgtgttcctgtttcctccaaagcctaaggacaccctgatgatcagcagaacccctgaagtgacctgcgtggtggtggatgtgtctcacgaggaccccgaagtgaagttcaattggtacgtggacggcgtggaagtgcacaacgccaagaccaagcctagagaggaacagtacaacagcacctacagagtggtgtccgtgctgacagtgctgcaccaggattggctgaacggcaaagagtacaagtgcaaggtgtccaacaaggccctgcctgctcctatcgagaaaaccatcagcaaggccaagggccagcctagggaaccccaggtttacaccctgcctccatgccgcgaggaaatgaccaagaaccaggtgtccctgtggtgcctcgtgaagggcttctacccttccgatatcgccgtggaatgggagagcaatggccagcctgagaacaactacaagacaacccctcctgtgctggacagcgacggctcattcttcctgtacagcaagctgaccgtggacaagtccagatggcagcagggcaacgtgttcagctgtagcgtgctgcacgaagccctgcacagccactacacccagaagtccctgtctctgagccccggcaagtgataaggatccgatctggtactgcatgcacgcaatgctagctgcccctttcccgtcctgggtaccccgagtctcccccgacctcgggtcccaggtatgctcccacctccacctgccccactcaccacctctgctagttccagacacctcccaagcacgcagcaatgcagctcaaaacgcttagcctagccacacccccacgggaaacagcagtgattaacctttagcaataaacgaaagtttaactaagctatactaaccccagggttggtcaatttcgtgccagccacaccctcgagctagcaaaaaaaaaaaaaaaaaaaaaaaaaaaaaagcatatgactaaaaaaaaaaaaaaaaaaaaaaaaaaaaaaaaaaaaaaaaaaaaaaaaaaaaaaaaaaaaaaaaaaaaaa

SEQ ID NO: 870 - RNA, 1937 nt, synthetic construct
  source 1..1937: mol_type = other RNA
agaataaactagtattcttctggtccccacagactcagagagaacccgccaccatggattggatttggagaatcctgttcctcgtgggcgccgctaccggagcccactcccaggtgcatctgacgcagtctgggcctgaggtgaggaagcctgggacctccgtaaaggtctcctgcaaggcccctggaaacacattgaagacttatgatctacactgggtgcgcagcgtccctggacaaggccttcagtggatgggatggataagccatgagggcgacaagaaggtcattgtggaaagattcaaggccaaagtcaccattgattgggacaggtccaccaatacggcctatctccaactgagcggcctcacatctggcgacacggccgtctattattgtgcgaaaggctcaaaacacaggctgcgagattacgctctctacgacgacgacggcgcattgaattgggctgtcgatgttgactacctttcgaacttggaattctggggccaagggaccgccgtcaccgtctcttcagcctctacaaagggccctagcgtgttccctctggctcctagcagcaagtcgacatctggcggaacagccgctctgggctgtctggtcaaggactactttcccgagcctgtgacagtgtcctggaactctggcgctctgacaagcggcgtgcacacatttccagccgtgctgcaaagcagcggcctgtactctctgagcagcgtggtcacagtgccaagctctagcctgggcacccagacctacatctgcaatgtgaaccacaagcctagcaacaccaaggtggacaagaaggtggaacccaagagctgcgacaagacccacacctgtcctccatgtcctgctccagaactgctggccggaccttccgtgttcctgtttcctccaaagcctaaggacaccctgatgatcagcagaacccctgaagtgacctgcgtggtggtggatgtgtctcacgaggaccccgaagtgaagttcaattggtacgtggacggcgtggaagtgcacaatgccaagaccaagcctagagaggaacagtacaacagcacctacagagtggtgtccgtgctgaccgtgctgcaccaggattggctgaacggcaaagagtacaagtgcaaggtgtccaacaaggccctgcctctgcctgaggaaaagaccatcagcaaggccaagggccagcctagggaaccccaggtttacacactgcctccaagccgcgaggaaatgaccaagaaccaggtgtccctgacctgcctcgtgaagggcttctacccttccgatatcgccgtggaatgggagagcaatggccagcctgagaacaactacaagacaacccctcctgtgctggacagcgacggctcattcttcctgtacagcaagctgaccgtggacaagtccagatggcagcagggcaacgtgttcagctgtagcgtgctgcacgaagccctgcacagccactacacccagaaaagcctgtctctgagccccggcaaatgataaggatccgatctggtactgcatgcacgcaatgctagctgcccctttcccgtcctgggtaccccgagtctcccccgacctcgggtcccaggtatgctcccacctccacctgccccactcaccacctctgctagttccagacacctcccaagcacgcagcaatgcagctcaaaacgcttagcctagccacacccccacgggaaacagcagtgattaacctttagcaataaacgaaagtttaactaagctatactaaccccagggttggtcaatttcgtgccagccacaccctcgagctagcaaaaaaaaaaaaaaaaaaaaaaaaaaaaaagcatatgactaaaaaaaaaaaaaaaaaaaaaaaaaaaaaaaaaaaaaaaaaaaaaaaaaaaaaaaaaaaaaaaaaaaaaa

SEQ ID NO: 871 - RNA, 1937 nt, synthetic construct
  source 1..1937: mol_type = other RNA
agaataaactagtattcttctggtccccacagactcagagagaacccgccaccatggattggatttggagaatcctgttcctcgtgggcgccgctaccggagcccactcccaggtgcatctgacgcagtctgggcctgaggtgaggaagcctgggacctccgtaaaggtctcctgcaaggcccctggaaacacattgaagacttatgatctacactgggtgcgcagcgtccctggacaaggccttcagtggatgggatggataagccatgagggcgacaagaaggtcattgtggaaagattcaaggccaaagtcaccattgattgggacaggtccaccaatacggcctatctccaactgagcggcctcacatctggcgacacggccgtctattattgtgcgaaaggctcaaaacacaggctgcgagattacgctctctacgacgacgacggcgcattgaattgggctgtcgatgttgactacctttcgaacttggaattctggggccaagggaccgccgtcaccgtctcttcagcctctacaaagggccctagcgtgttccctctggctcctagcagcaagtcgacatctggcggaacagccgctctgggctgtctggtcaaggactactttcccgagcctgtgacagtgtcctggaactctggcgctctgacaagcggcgtgcacacatttccagccgtgctgcaaagcagcggcctgtactctctgagcagcgtggtcacagtgccaagctctagcctgggcacccagacctacatctgcaatgtgaaccacaagcctagcaacaccaaggtggacaagaaggtggaacccaagagctgcgacaagacccacacctgtcctccatgtcctgctccagaactgctggccggaccttccgtgttcctgtttcctccaaagcctaaggacaccctgatgatcagcagaacccctgaagtgacctgcgtggtggtggatgtgtctcacgaggaccctgaagtgaagttcaattggtacgtggacggcgtggaagtgcacaacgccaagaccaagcctagagaggaacagtacaacagcacctacagagtggtgtccgtgctgaccgtgctgcaccaggattggctgaacggcaaagagtacaagtgcaaggtgtccaacaaggccctgcctgcccctgaggaaaagaccatcagcaaggccaagggccagcctagggaaccccaggtttacacactgcctccaagccgcgaggaaatgaccaagaaccaggtgtccctgacctgcctcgtgaagggcttctacccttccgatatcgccgtggaatgggagagcaatggccagcctgagaacaactacaagacaacccctcctgtgctggacagcgacggctcattcttcctgtacagcaagctgaccgtggacaagtccagatggcagcagggcaacgtgttcagctgtagcgtgctgcacgaagccctgcacagccactacacccagaaaagcctgtctctgagccccggcaaatgataaggatccgatctggtactgcatgcacgcaatgctagctgcccctttcccgtcctgggtaccccgagtctcccccgacctcgggtcccaggtatgctcccacctccacctgccccactcaccacctctgctagttccagacacctcccaagcacgcagcaatgcagctcaaaacgcttagcctagccacacccccacgggaaacagcagtgattaacctttagcaataaacgaaagtttaactaagctatactaaccccagggttggtcaatttcgtgccagccacaccctcgagctagcaaaaaaaaaaaaaaaaaaaaaaaaaaaaaagcatatgactaaaaaaaaaaaaaaaaaaaaaaaaaaaaaaaaaaaaaaaaaaaaaaaaaaaaaaaaaaaaaaaaaaaaaa

SEQ ID NO: 872 - RNA, 1937 nt, synthetic construct
  source 1..1937: mol_type = other RNA
agaataaactagtattcttctggtccccacagactcagagagaacccgccaccatggattggatttggagaatcctgttcctcgtgggcgccgctaccggagcccactcccaggtgcatctgacgcagtctgggcctgaggtgaggaagcctgggacctccgtaaaggtctcctgcaaggcccctggaaacacattgaagacttatgatctacactgggtgcgcagcgtccctggacaaggccttcagtggatgggatggataagccatgagggcgacaagaaggtcattgtggaaagattcaaggccaaagtcaccattgattgggacaggtccaccaatacggcctatctccaactgagcggcctcacatctggcgacacggccgtctattattgtgcgaaaggctcaaaacacaggctgcgagattacgctctctacgacgacgacggcgcattgaattgggctgtcgatgttgactacctttcgaacttggaattctggggccaagggaccgccgtcaccgtctcttcagcctctacaaagggccctagcgtgttccctctggctcctagcagcaagtcgacatctggcggaacagccgctctgggctgtctggtcaaggactactttcccgagcctgtgacagtgtcctggaactctggcgctctgacaagcggcgtgcacacatttccagccgtgctgcaaagcagcggcctgtactctctgagcagcgtggtcacagtgccaagctctagcctgggcacccagacctacatctgcaatgtgaaccacaagcctagcaacaccaaggtggacaagaaggtggaacccaagagctgcgacaagacccacacctgtcctccatgtcctgctccagaactgctggccggaccttccgtgttcctgtttcctccaaagcctaaggacaccctgatgatcagcagaacccctgaagtgacctgcgtggtggtggatgtgtctcacgaggaccctgaagtgaagttcaattggtacgtggacggcgtggaagtgcacaacgccaagaccaagcctagagaggaacagtacaacagcacctacagagtggtgtccgtgctgaccgtgctgcaccaggattggctgaacggcaaagagtacaagtgcaaggtgtccaacaaggccctgcctgcccctatcgaaaagaccatcagcaaggccaagggccagcctagggaaccccaggtttacacactgcctccaagccgcgaggaaatgaccaagaaccaggtgtccctgacctgcctcgtgaagggcttctacccttccgatatcgccgtggaatgggagagcaatggccagcctgagaacaactacaagacaacccctcctgtgctggacagcgacggctcattcttcctgtacagcaagctgaccgtggacaagtccagatggcagcagggcaacgtgttcagctgtagcgtgctgcacgaagccctgcacagccactacacccagaaaagcctgtctctgagccccggcaaatgataaggatccgatctggtactgcatgcacgcaatgctagctgcccctttcccgtcctgggtaccccgagtctcccccgacctcgggtcccaggtatgctcccacctccacctgccccactcaccacctctgctagttccagacacctcccaagcacgcagcaatgcagctcaaaacgcttagcctagccacacccccacgggaaacagcagtgattaacctttagcaataaacgaaagtttaactaagctatactaaccccagggttggtcaatttcgtgccagccacaccctcgagctagcaaaaaaaaaaaaaaaaaaaaaaaaaaaaaagcatatgactaaaaaaaaaaaaaaaaaaaaaaaaaaaaaaaaaaaaaaaaaaaaaaaaaaaaaaaaaaaaaaaaaaaaaa

SEQ ID NO: 873 - RNA, 1937 nt, synthetic construct
  source 1..1937: mol_type = other RNA
agaataaactagtattcttctggtccccacagactcagagagaacccgccaccatggattggatttggagaatcctgttcctcgtgggcgccgctaccggagcccactcccaggtgcatctgacgcagtctgggcctgaggtgaggaagcctgggacctccgtaaaggtctcctgcaaggcccctggaaacacattgaagacttatgatctacactgggtgcgcagcgtccctggacaaggccttcagtggatgggatggataagccatgagggcgacaagaaggtcattgtggaaagattcaaggccaaagtcaccattgattgggacaggtccaccaatacggcctatctccaactgagcggcctcacatctggcgacacggccgtctattattgtgcgaaaggctcaaaacacaggctgcgagattacgctctctacgacgacgacggcgcattgaattgggctgtcgatgttgactacctttcgaacttggaattctggggccaagggaccgccgtcaccgtctcttcagcctctacaaagggccctagcgtgttccctctggctcctagcagcaagtcgacatctggcggaacagccgctctgggctgtctggtcaaggactactttcccgagcctgtgacagtgtcctggaactctggcgctctgacaagcggcgtgcacacatttccagccgtgctgcaaagcagcggcctgtactctctgagcagcgtggtcacagtgccaagctctagcctgggcacccagacctacatctgcaatgtgaaccacaagcctagcaacaccaaggtggacaagaaggtggaacccaagagctgcgacaagacccacacctgtcctccatgtcctgctccagaactgctgggcggaccttccgtgttcctgtttcctccaaagcctaaggacaccctgatgatcagcagaacccctgaagtgacctgcgtggtggtggatgtgtctcacgaggaccctgaagtgaagttcaattggtacgtggacggcgtggaagtgcacaacgccaagaccaagcctagagaggaacagtacaacagcacctacagagtggtgtccgtgctgaccgtgctgcaccaggattggctgaacggcaaagagtacaagtgcaaggtgtccaacaaggccctgcctgcccctgaggaaaagaccatcagcaaggccaagggccagcctagggaaccccaggtttacacactgcctccaagccgcgaggaaatgaccaagaaccaggtgtccctgacctgcctcgtgaagggcttctacccttccgatatcgccgtggaatgggagagcaatggccagcctgagaacaactacaagacaacccctcctgtgctggacagcgacggctcattcttcctgtacagcaagctgaccgtggacaagtccagatggcagcagggcaacgtgttcagctgtagcgtgctgcacgaagccctgcacagccactacacccagaaaagcctgtctctgagccccggcaaatgataaggatccgatctggtactgcatgcacgcaatgctagctgcccctttcccgtcctgggtaccccgagtctcccccgacctcgggtcccaggtatgctcccacctccacctgccccactcaccacctctgctagttccagacacctcccaagcacgcagcaatgcagctcaaaacgcttagcctagccacacccccacgggaaacagcagtgattaacctttagcaataaacgaaagtttaactaagctatactaaccccagggttggtcaatttcgtgccagccacaccctcgagctagcaaaaaaaaaaaaaaaaaaaaaaaaaaaaaagcatatgactaaaaaaaaaaaaaaaaaaaaaaaaaaaaaaaaaaaaaaaaaaaaaaaaaaaaaaaaaaaaaaaaaaaaaa

SEQ ID NO: 874 - RNA, 1937 nt, synthetic construct
  source 1..1937: mol_type = other RNA
agaataaactagtattcttctggtccccacagactcagagagaacccgccaccatggattggatttggagaatcctgttcctcgtgggcgccgctaccggagcccactcccaggtgcatctgacgcagtctgggcctgaggtgaggaagcctgggacctccgtaaaggtctcctgcaaggcccctggaaacacattgaagacttatgatctacactgggtgcgcagcgtccctggacaaggccttcagtggatgggatggataagccatgagggcgacaagaaggtcattgtggaaagattcaaggccaaagtcaccattgattgggacaggtccaccaatacggcctatctccaactgagcggcctcacatctggcgacacggccgtctattattgtgcgaaaggctcaaaacacaggctgcgagattacgctctctacgacgacgacggcgcattgaattgggctgtcgatgttgactacctttcgaacttggaattctggggccaagggaccgccgtcaccgtctcttcagcctctacaaagggccctagcgtgttccctctggctcctagcagcaagtcgacatctggcggaacagccgctctgggctgtctggtcaaggactactttcccgagcctgtgacagtgtcctggaactctggcgctctgacaagcggcgtgcacacatttccagccgtgctgcaaagcagcggcctgtactctctgagcagcgtggtcacagtgccaagctctagcctgggcacccagacctacatctgcaatgtgaaccacaagcctagcaacaccaaggtggacaagaaggtggaacccaagagctgcgacaagacccacacctgtcctccatgtcctgctccagaactgctggccggaccttccgtgttcctgtttcctccaaagcctaaggacaccctgatgatcagcagaacccctgaagtgacctgcgtggtggtggatgtgtctcacgaggaccccgaagtgaagttcaattggtacgtggacggcgtggaagtgcacaatgccaagaccaagcctagagaggaacagtacaacagcacctacagagtggtgtccgtgctgaccgtgctgcaccaggattggctgaacggcaaagagtacaagtgcaaggtgtccaacaaggccctgcctctgcctgaggaaaagaccatcagcaaggccaagggccagcctagggaaccccaagtctgtacactgcctcctagccgcgaggaaatgaccaagaaccaggtgtccctgagctgcgccgtgaagggcttttacccttccgatatcgccgtggaatgggagagcaatggccagcctgagaacaactacaagacaacccctcctgtgctggacagcgacggctcattcttcctggtgtccaagctgacagtggacaagagcagatggcagcagggcaacgtgttcagctgctctgtgctgcacgaagccctgcacagccactacacccagaagtccctgtctctgagccccggcaagtgataaggatccgatctggtactgcatgcacgcaatgctagctgcccctttcccgtcctgggtaccccgagtctcccccgacctcgggtcccaggtatgctcccacctccacctgccccactcaccacctctgctagttccagacacctcccaagcacgcagcaatgcagctcaaaacgcttagcctagccacacccccacgggaaacagcagtgattaacctttagcaataaacgaaagtttaactaagctatactaaccccagggttggtcaatttcgtgccagccacaccctcgagctagcaaaaaaaaaaaaaaaaaaaaaaaaaaaaaagcatatgactaaaaaaaaaaaaaaaaaaaaaaaaaaaaaaaaaaaaaaaaaaaaaaaaaaaaaaaaaaaaaaaaaaaaaa

SEQ ID NO: 875 - RNA, 1937 nt, synthetic construct
  source 1..1937: mol_type = other RNA
agaataaactagtattcttctggtccccacagactcagagagaacccgccaccatggattggatttggagaatcctgttcctcgtgggcgccgctaccggagcccactcccaggtgcatctgacgcagtctgggcctgaggtgaggaagcctgggacctccgtaaaggtctcctgcaaggcccctggaaacacattgaagacttatgatctacactgggtgcgcagcgtccctggacaaggccttcagtggatgggatggataagccatgagggcgacaagaaggtcattgtggaaagattcaaggccaaagtcaccattgattgggacaggtccaccaatacggcctatctccaactgagcggcctcacatctggcgacacggccgtctattattgtgcgaaaggctcaaaacacaggctgcgagattacgctctctacgacgacgacggcgcattgaattgggctgtcgatgttgactacctttcgaacttggaattctggggccaagggaccgccgtcaccgtctcttcagcctctacaaagggccctagcgtgttccctctggctcctagcagcaagtcgacatctggcggaacagccgctctgggctgtctggtcaaggactactttcccgagcctgtgacagtgtcctggaactctggcgctctgacaagcggcgtgcacacatttccagccgtgctgcaaagcagcggcctgtactctctgagcagcgtggtcacagtgccaagctctagcctgggcacccagacctacatctgcaatgtgaaccacaagcctagcaacaccaaggtggacaagaaggtggaacccaagagctgcgacaagacccacacctgtcctccatgtcctgctccagaactgctggccggaccttccgtgttcctgtttcctccaaagcctaaggacaccctgatgatcagcagaacccctgaagtgacctgcgtggtggtggatgtgtctcacgaggaccctgaagtgaagttcaattggtacgtggacggcgtggaagtgcacaacgccaagaccaagcctagagaggaacagtacaacagcacctacagagtggtgtccgtgctgaccgtgctgcaccaggattggctgaacggcaaagagtacaagtgcaaggtgtccaacaaggccctgcctgcccctgaggaaaagaccatcagcaaggccaagggccagcctagggaaccccaagtctgtacactgcctcctagccgcgaggaaatgaccaagaaccaggtgtccctgagctgcgccgtgaagggcttttacccttccgatatcgccgtggaatgggagagcaatggccagcctgagaacaactacaagacaacccctcctgtgctggacagcgacggctcattcttcctggtgtccaagctgacagtggacaagagcagatggcagcagggcaacgtgttcagctgctctgtgctgcacgaagccctgcacagccactacacccagaagtccctgtctctgagccccggcaagtgataaggatccgatctggtactgcatgcacgcaatgctagctgcccctttcccgtcctgggtaccccgagtctcccccgacctcgggtcccaggtatgctcccacctccacctgccccactcaccacctctgctagttccagacacctcccaagcacgcagcaatgcagctcaaaacgcttagcctagccacacccccacgggaaacagcagtgattaacctttagcaataaacgaaagtttaactaagctatactaaccccagggttggtcaatttcgtgccagccacaccctcgagctagcaaaaaaaaaaaaaaaaaaaaaaaaaaaaaagcatatgactaaaaaaaaaaaaaaaaaaaaaaaaaaaaaaaaaaaaaaaaaaaaaaaaaaaaaaaaaaaaaaaaaaaaaa

SEQ ID NO: 876 - RNA, 1937 nt, synthetic construct
  source 1..1937: mol_type = other RNA
agaataaactagtattcttctggtccccacagactcagagagaacccgccaccatggattggatttggagaatcctgttcctcgtgggcgccgctaccggagcccactcccaggtgcatctgacgcagtctgggcctgaggtgaggaagcctgggacctccgtaaaggtctcctgcaaggcccctggaaacacattgaagacttatgatctacactgggtgcgcagcgtccctggacaaggccttcagtggatgggatggataagccatgagggcgacaagaaggtcattgtggaaagattcaaggccaaagtcaccattgattgggacaggtccaccaatacggcctatctccaactgagcggcctcacatctggcgacacggccgtctattattgtgcgaaaggctcaaaacacaggctgcgagattacgctctctacgacgacgacggcgcattgaattgggctgtcgatgttgactacctttcgaacttggaattctggggccaagggaccgccgtcaccgtctcttcagcctctacaaagggccctagcgtgttccctctggctcctagcagcaagtcgacatctggcggaacagccgctctgggctgtctggtcaaggactactttcccgagcctgtgacagtgtcctggaactctggcgctctgacaagcggcgtgcacacatttccagccgtgctgcaaagcagcggcctgtactctctgagcagcgtggtcacagtgccaagctctagcctgggcacccagacctacatctgcaatgtgaaccacaagcctagcaacaccaaggtggacaagaaggtggaacccaagagctgcgacaagacccacacctgtcctccatgtcctgctccagaactgctggccggaccttccgtgttcctgtttcctccaaagcctaaggacaccctgatgatcagcagaacccctgaagtgacctgcgtggtggtggatgtgtctcacgaggaccctgaagtgaagttcaattggtacgtggacggcgtggaagtgcacaacgccaagaccaagcctagagaggaacagtacaacagcacctacagagtggtgtccgtgctgaccgtgctgcaccaggattggctgaacggcaaagagtacaagtgcaaggtgtccaacaaggccctgcctgcccctatcgaaaagaccatcagcaaggccaagggccagcctagggaaccccaagtctgtacactgcctcctagccgcgaggaaatgaccaagaaccaggtgtccctgagctgcgccgtgaagggcttttacccttccgatatcgccgtggaatgggagagcaatggccagcctgagaacaactacaagacaacccctcctgtgctggacagcgacggctcattcttcctggtgtccaagctgacagtggacaagagcagatggcagcagggcaacgtgttcagctgctctgtgctgcacgaagccctgcacagccactacacccagaagtccctgtctctgagccccggcaagtgataaggatccgatctggtactgcatgcacgcaatgctagctgcccctttcccgtcctgggtaccccgagtctcccccgacctcgggtcccaggtatgctcccacctccacctgccccactcaccacctctgctagttccagacacctcccaagcacgcagcaatgcagctcaaaacgcttagcctagccacacccccacgggaaacagcagtgattaacctttagcaataaacgaaagtttaactaagctatactaaccccagggttggtcaatttcgtgccagccacaccctcgagctagcaaaaaaaaaaaaaaaaaaaaaaaaaaaaaagcatatgactaaaaaaaaaaaaaaaaaaaaaaaaaaaaaaaaaaaaaaaaaaaaaaaaaaaaaaaaaaaaaaaaaaaaaa

SEQ ID NO: 877 - RNA, 1937 nt, synthetic construct
  source 1..1937: mol_type = other RNA
agaataaactagtattcttctggtccccacagactcagagagaacccgccaccatggattggatttggagaatcctgttcctcgtgggcgccgctaccggagcccactcccaggtgcatctgacgcagtctgggcctgaggtgaggaagcctgggacctccgtaaaggtctcctgcaaggcccctggaaacacattgaagacttatgatctacactgggtgcgcagcgtccctggacaaggccttcagtggatgggatggataagccatgagggcgacaagaaggtcattgtggaaagattcaaggccaaagtcaccattgattgggacaggtccaccaatacggcctatctccaactgagcggcctcacatctggcgacacggccgtctattattgtgcgaaaggctcaaaacacaggctgcgagattacgctctctacgacgacgacggcgcattgaattgggctgtcgatgttgactacctttcgaacttggaattctggggccaagggaccgccgtcaccgtctcttcagcctctacaaagggccctagcgtgttccctctggctcctagcagcaagtcgacatctggcggaacagccgctctgggctgtctggtcaaggactactttcccgagcctgtgacagtgtcctggaactctggcgctctgacaagcggcgtgcacacatttccagccgtgctgcaaagcagcggcctgtactctctgagcagcgtggtcacagtgccaagctctagcctgggcacccagacctacatctgcaatgtgaaccacaagcctagcaacaccaaggtggacaagaaggtggaacccaagagctgcgacaagacccacacctgtcctccatgtcctgctccagaactgctgggcggaccttccgtgttcctgtttcctccaaagcctaaggacaccctgatgatcagcagaacccctgaagtgacctgcgtggtggtggatgtgtctcacgaggaccctgaagtgaagttcaattggtacgtggacggcgtggaagtgcacaacgccaagaccaagcctagagaggaacagtacaacagcacctacagagtggtgtccgtgctgaccgtgctgcaccaggattggctgaacggcaaagagtacaagtgcaaggtgtccaacaaggccctgcctgcccctgaggaaaagaccatcagcaaggccaagggccagcctagggaaccccaagtctgtacactgcctcctagccgcgaggaaatgaccaagaaccaggtgtccctgagctgcgccgtgaagggcttttacccttccgatatcgccgtggaatgggagagcaatggccagcctgagaacaactacaagacaacccctcctgtgctggacagcgacggctcattcttcctggtgtccaagctgacagtggacaagagcagatggcagcagggcaacgtgttcagctgctctgtgctgcacgaagccctgcacagccactacacccagaagtccctgtctctgagccccggcaagtgataaggatccgatctggtactgcatgcacgcaatgctagctgcccctttcccgtcctgggtaccccgagtctcccccgacctcgggtcccaggtatgctcccacctccacctgccccactcaccacctctgctagttccagacacctcccaagcacgcagcaatgcagctcaaaacgcttagcctagccacacccccacgggaaacagcagtgattaacctttagcaataaacgaaagtttaactaagctatactaaccccagggttggtcaatttcgtgccagccacaccctcgagctagcaaaaaaaaaaaaaaaaaaaaaaaaaaaaaagcatatgactaaaaaaaaaaaaaaaaaaaaaaaaaaaaaaaaaaaaaaaaaaaaaaaaaaaaaaaaaaaaaaaaaaaaaa

SEQ ID NO: 878 - RNA, 1937 nt, synthetic construct
  source 1..1937: mol_type = other RNA
agaataaactagtattcttctggtccccacagactcagagagaacccgccaccatggattggatttggagaatcctgttcctcgtgggcgccgctaccggagcccactcccaggtgcatctgacgcagtctgggcctgaggtgaggaagcctgggacctccgtaaaggtctcctgcaaggcccctggaaacacattgaagacttatgatctacactgggtgcgcagcgtccctggacaaggccttcagtggatgggatggataagccatgagggcgacaagaaggtcattgtggaaagattcaaggccaaagtcaccattgattgggacaggtccaccaatacggcctatctccaactgagcggcctcacatctggcgacacggccgtctattattgtgcgaaaggctcaaaacacaggctgcgagattacgctctctacgacgacgacggcgcattgaattgggctgtcgatgttgactacctttcgaacttggaattctggggccaagggaccgccgtcaccgtctcttcagcctctacaaagggccctagcgtgttccctctggctcctagcagcaagtcgacatctggcggaacagccgctctgggctgtctggtcaaggactactttcccgagcctgtgacagtgtcctggaactctggcgctctgacaagcggcgtgcacacatttccagccgtgctgcaaagcagcggcctgtactctctgagcagcgtggtcacagtgccaagctctagcctgggcacccagacctacatctgcaatgtgaaccacaagcctagcaacaccaaggtggacaagaaggtggaacccaagagctgcgacaagacccacacctgtcctccatgtcctgctccagaactgctggccggaccttccgtgttcctgtttcctccaaagcctaaggacaccctgatgatcagcagaacccctgaagtgacctgcgtggtggtggatgtgtctcacgaggaccccgaagtgaagttcaattggtacgtggacggcgtggaagtgcacaatgccaagaccaagcctagagaggaacagtacaacagcacctacagagtggtgtccgtgctgaccgtgctgcaccaggattggctgaacggcaaagagtacaagtgcaaggtgtccaacaaggccctgcctctgcctgaggaaaagaccatcagcaaggccaagggccagcctagggaaccccaggtttacaccctgcctccatgccgcgaggaaatgaccaagaaccaggtgtccctgtggtgcctcgtgaagggcttctacccttccgatatcgccgtggaatgggagagcaatggccagcctgagaacaactacaagacaacccctcctgtgctggacagcgacggctcattcttcctgtacagcaagctgaccgtggacaagtccagatggcagcagggcaacgtgttcagctgtagcgtgctgcacgaagccctgcacagccactacacccagaagtccctgtctctgagccccggcaagtgataaggatccgatctggtactgcatgcacgcaatgctagctgcccctttcccgtcctgggtaccccgagtctcccccgacctcgggtcccaggtatgctcccacctccacctgccccactcaccacctctgctagttccagacacctcccaagcacgcagcaatgcagctcaaaacgcttagcctagccacacccccacgggaaacagcagtgattaacctttagcaataaacgaaagtttaactaagctatactaaccccagggttggtcaatttcgtgccagccacaccctcgagctagcaaaaaaaaaaaaaaaaaaaaaaaaaaaaaagcatatgactaaaaaaaaaaaaaaaaaaaaaaaaaaaaaaaaaaaaaaaaaaaaaaaaaaaaaaaaaaaaaaaaaaaaaa

SEQ ID NO: 879 - RNA, 1937 nt, synthetic construct
  source 1..1937: mol_type = other RNA
agaataaactagtattcttctggtccccacagactcagagagaacccgccaccatggattggatttggagaatcctgttcctcgtgggcgccgctaccggagcccactcccaggtgcatctgacgcagtctgggcctgaggtgaggaagcctgggacctccgtaaaggtctcctgcaaggcccctggaaacacattgaagacttatgatctacactgggtgcgcagcgtccctggacaaggccttcagtggatgggatggataagccatgagggcgacaagaaggtcattgtggaaagattcaaggccaaagtcaccattgattgggacaggtccaccaatacggcctatctccaactgagcggcctcacatctggcgacacggccgtctattattgtgcgaaaggctcaaaacacaggctgcgagattacgctctctacgacgacgacggcgcattgaattgggctgtcgatgttgactacctttcgaacttggaattctggggccaagggaccgccgtcaccgtctcttcagcctctacaaagggccctagcgtgttccctctggctcctagcagcaagtcgacatctggcggaacagccgctctgggctgtctggtcaaggactactttcccgagcctgtgacagtgtcctggaactctggcgctctgacaagcggcgtgcacacatttccagccgtgctgcaaagcagcggcctgtactctctgagcagcgtggtcacagtgccaagctctagcctgggcacccagacctacatctgcaatgtgaaccacaagcctagcaacaccaaggtggacaagaaggtggaacccaagagctgcgacaagacccacacctgtcctccatgtcctgctccagaactgctggccggaccttccgtgttcctgtttcctccaaagcctaaggacaccctgatgatcagcagaacccctgaagtgacctgcgtggtggtggatgtgtctcacgaggaccctgaagtgaagttcaattggtacgtggacggcgtggaagtgcacaacgccaagaccaagcctagagaggaacagtacaacagcacctacagagtggtgtccgtgctgaccgtgctgcaccaggattggctgaacggcaaagagtacaagtgcaaggtgtccaacaaggccctgcctgcccctgaggaaaagaccatcagcaaggccaagggccagcctagggaaccccaggtttacaccctgcctccatgccgcgaggaaatgaccaagaaccaggtgtccctgtggtgcctcgtgaagggcttctacccttccgatatcgccgtggaatgggagagcaatggccagcctgagaacaactacaagacaacccctcctgtgctggacagcgacggctcattcttcctgtacagcaagctgaccgtggacaagtccagatggcagcagggcaacgtgttcagctgtagcgtgctgcacgaagccctgcacagccactacacccagaagtccctgtctctgagccccggcaagtgataaggatccgatctggtactgcatgcacgcaatgctagctgcccctttcccgtcctgggtaccccgagtctcccccgacctcgggtcccaggtatgctcccacctccacctgccccactcaccacctctgctagttccagacacctcccaagcacgcagcaatgcagctcaaaacgcttagcctagccacacccccacgggaaacagcagtgattaacctttagcaataaacgaaagtttaactaagctatactaaccccagggttggtcaatttcgtgccagccacaccctcgagctagcaaaaaaaaaaaaaaaaaaaaaaaaaaaaaagcatatgactaaaaaaaaaaaaaaaaaaaaaaaaaaaaaaaaaaaaaaaaaaaaaaaaaaaaaaaaaaaaaaaaaaaaaa

SEQ ID NO: 880 - RNA, 1937 nt, synthetic construct
  source 1..1937: mol_type = other RNA
agaataaactagtattcttctggtccccacagactcagagagaacccgccaccatggattggatttggagaatcctgttcctcgtgggcgccgctaccggagcccactcccaggtgcatctgacgcagtctgggcctgaggtgaggaagcctgggacctccgtaaaggtctcctgcaaggcccctggaaacacattgaagacttatgatctacactgggtgcgcagcgtccctggacaaggccttcagtggatgggatggataagccatgagggcgacaagaaggtcattgtggaaagattcaaggccaaagtcaccattgattgggacaggtccaccaatacggcctatctccaactgagcggcctcacatctggcgacacggccgtctattattgtgcgaaaggctcaaaacacaggctgcgagattacgctctctacgacgacgacggcgcattgaattgggctgtcgatgttgactacctttcgaacttggaattctggggccaagggaccgccgtcaccgtctcttcagcctctacaaagggccctagcgtgttccctctggctcctagcagcaagtcgacatctggcggaacagccgctctgggctgtctggtcaaggactactttcccgagcctgtgacagtgtcctggaactctggcgctctgacaagcggcgtgcacacatttccagccgtgctgcaaagcagcggcctgtactctctgagcagcgtggtcacagtgccaagctctagcctgggcacccagacctacatctgcaatgtgaaccacaagcctagcaacaccaaggtggacaagaaggtggaacccaagagctgcgacaagacccacacctgtcctccatgtcctgctccagaactgctggccggaccttccgtgttcctgtttcctccaaagcctaaggacaccctgatgatcagcagaacccctgaagtgacctgcgtggtggtggatgtgtctcacgaggaccctgaagtgaagttcaattggtacgtggacggcgtggaagtgcacaacgccaagaccaagcctagagaggaacagtacaacagcacctacagagtggtgtccgtgctgaccgtgctgcaccaggattggctgaacggcaaagagtacaagtgcaaggtgtccaacaaggccctgcctgcccctatcgaaaagaccatcagcaaggccaagggccagcctagggaaccccaggtttacaccctgcctccatgccgcgaggaaatgaccaagaaccaggtgtccctgtggtgcctcgtgaagggcttctacccttccgatatcgccgtggaatgggagagcaatggccagcctgagaacaactacaagacaacccctcctgtgctggacagcgacggctcattcttcctgtacagcaagctgaccgtggacaagtccagatggcagcagggcaacgtgttcagctgtagcgtgctgcacgaagccctgcacagccactacacccagaagtccctgtctctgagccccggcaagtgataaggatccgatctggtactgcatgcacgcaatgctagctgcccctttcccgtcctgggtaccccgagtctcccccgacctcgggtcccaggtatgctcccacctccacctgccccactcaccacctctgctagttccagacacctcccaagcacgcagcaatgcagctcaaaacgcttagcctagccacacccccacgggaaacagcagtgattaacctttagcaataaacgaaagtttaactaagctatactaaccccagggttggtcaatttcgtgccagccacaccctcgagctagcaaaaaaaaaaaaaaaaaaaaaaaaaaaaaagcatatgactaaaaaaaaaaaaaaaaaaaaaaaaaaaaaaaaaaaaaaaaaaaaaaaaaaaaaaaaaaaaaaaaaaaaaa

SEQ ID NO: 881 - RNA, 1937 nt, synthetic construct
  source 1..1937: mol_type = other RNA
agaataaactagtattcttctggtccccacagactcagagagaacccgccaccatggattggatttggagaatcctgttcctcgtgggcgccgctaccggagcccactcccaggtgcatctgacgcagtctgggcctgaggtgaggaagcctgggacctccgtaaaggtctcctgcaaggcccctggaaacacattgaagacttatgatctacactgggtgcgcagcgtccctggacaaggccttcagtggatgggatggataagccatgagggcgacaagaaggtcattgtggaaagattcaaggccaaagtcaccattgattgggacaggtccaccaatacggcctatctccaactgagcggcctcacatctggcgacacggccgtctattattgtgcgaaaggctcaaaacacaggctgcgagattacgctctctacgacgacgacggcgcattgaattgggctgtcgatgttgactacctttcgaacttggaattctggggccaagggaccgccgtcaccgtctcttcagcctctacaaagggccctagcgtgttccctctggctcctagcagcaagtcgacatctggcggaacagccgctctgggctgtctggtcaaggactactttcccgagcctgtgacagtgtcctggaactctggcgctctgacaagcggcgtgcacacatttccagccgtgctgcaaagcagcggcctgtactctctgagcagcgtggtcacagtgccaagctctagcctgggcacccagacctacatctgcaatgtgaaccacaagcctagcaacaccaaggtggacaagaaggtggaacccaagagctgcgacaagacccacacctgtcctccatgtcctgctccagaactgctgggcggaccttccgtgttcctgtttcctccaaagcctaaggacaccctgatgatcagcagaacccctgaagtgacctgcgtggtggtggatgtgtctcacgaggaccctgaagtgaagttcaattggtacgtggacggcgtggaagtgcacaacgccaagaccaagcctagagaggaacagtacaacagcacctacagagtggtgtccgtgctgaccgtgctgcaccaggattggctgaacggcaaagagtacaagtgcaaggtgtccaacaaggccctgcctgcccctgaggaaaagaccatcagcaaggccaagggccagcctagggaaccccaggtttacaccctgcctccatgccgcgaggaaatgaccaagaaccaggtgtccctgtggtgcctcgtgaagggcttctacccttccgatatcgccgtggaatgggagagcaatggccagcctgagaacaactacaagacaacccctcctgtgctggacagcgacggctcattcttcctgtacagcaagctgaccgtggacaagtccagatggcagcagggcaacgtgttcagctgtagcgtgctgcacgaagccctgcacagccactacacccagaagtccctgtctctgagccccggcaagtgataaggatccgatctggtactgcatgcacgcaatgctagctgcccctttcccgtcctgggtaccccgagtctcccccgacctcgggtcccaggtatgctcccacctccacctgccccactcaccacctctgctagttccagacacctcccaagcacgcagcaatgcagctcaaaacgcttagcctagccacacccccacgggaaacagcagtgattaacctttagcaataaacgaaagtttaactaagctatactaaccccagggttggtcaatttcgtgccagccacaccctcgagctagcaaaaaaaaaaaaaaaaaaaaaaaaaaaaaagcatatgactaaaaaaaaaaaaaaaaaaaaaaaaaaaaaaaaaaaaaaaaaaaaaaaaaaaaaaaaaaaaaaaaaaaaaa

SEQ ID NO: 882 - RNA, 1937 nt, synthetic construct
  source 1..1937: mol_type = other RNA
agaataaactagtattcttctggtccccacagactcagagagaacccgccaccatggattggatttggagaatcctgttcctcgtgggcgccgctaccggagcccactcccaggtgcatctgacgcagtctgggcctgaggtgaggaagcctgggacctccgtaaaggtctcctgcaaggcccctggaaacacattgaagacttatgatctacactgggtgcgcagcgtccctggacaaggccttcagtggatgggatggataagccatgagggcgacaagaaggtcattgtggaaagattcaaggccaaagtcaccattgattgggacaggtccaccaatacggcctatctccaactgagcggcctcacatctggcgacacggccgtctattattgtgcgaaaggctcaaaacacaggctgcgagattacgctctctacgacgacgacggcgcattgaattgggctgtcgatgttgactacctttcgaacttggaattctggggccaagggaccgccgtcaccgtctcttcagcctctacaaagggccctagcgtgttccctctggctcctagcagcaagtcgacatctggcggaacagccgctctgggctgtctggtcaaggactactttcccgagcctgtgacagtgtcctggaactctggcgctctgacaagcggcgtgcacacatttccagccgtgctgcaaagcagcggcctgtactctctgagcagcgtggtcacagtgccaagctctagcctgggcacccagacctacatctgcaatgtgaaccacaagcctagcaacaccaaggtggacaagaaggtggaacccaagagctgcgacaagacccacacctgtcctccatgtcctgctccagaactgctcggcggaccttccgtgttcctgtttcctccaaagcctaaggacaccctgatgatcagcagaacccctgaagtgacctgcgtggtggtggatgtgtctcacgaggaccccgaagtgaagttcaattggtacgtggacggcgtggaagtgcacaacgccaagaccaagcctagagaggaacagtacaacagcacctacagagtggtgtccgtgctgacagtgctgcaccaggattggctgaacggcaaagagtacaagtgcaaggtgtccaacaaggccctgcctgctcctatcgagaaaaccatcagcaaggccaagggccagcctagggaaccccaggtttacacactgcctccaagccgcgacgaactgaccaagaaccaggtgtccctgacctgcctcgtgaagggcttctacccttccgatatcgccgtggaatgggagagcaatggccagcctgagaacaactacaagacaacccctcctgtgctggacagcgacggctcattcttcctgtacagcaagctgactgtggataagtcccggtggcagcagggcaacgtgttcagctgttctgtgatgcacgaagccctgcacaaccactacacccagaaaagcctgtctctgagccccggcaagtgataaggatccgatctggtactgcatgcacgcaatgctagctgcccctttcccgtcctgggtaccccgagtctcccccgacctcgggtcccaggtatgctcccacctccacctgccccactcaccacctctgctagttccagacacctcccaagcacgcagcaatgcagctcaaaacgcttagcctagccacacccccacgggaaacagcagtgattaacctttagcaataaacgaaagtttaactaagctatactaaccccagggttggtcaatttcgtgccagccacaccctcgagctagcaaaaaaaaaaaaaaaaaaaaaaaaaaaaaagcatatgactaaaaaaaaaaaaaaaaaaaaaaaaaaaaaaaaaaaaaaaaaaaaaaaaaaaaaaaaaaaaaaaaaaaaaa

SEQ ID NO: 883 - RNA, 1937 nt, synthetic construct
  source 1..1937: mol_type = other RNA
agaataaactagtattcttctggtccccacagactcagagagaacccgccaccatggattggatttggagaatcctgttcctcgtgggcgccgctaccggagcccactcccaggtgcatctgacgcagtctgggcctgaggtgaggaagcctgggacctccgtaaaggtctcctgcaaggcccctggaaacacattgaagacttatgatctacactgggtgcgcagcgtccctggacaaggccttcagtggatgggatggataagccatgagggcgacaagaaggtcattgtggaaagattcaaggccaaagtcaccattgattgggacaggtccaccaatacggcctatctccaactgagcggcctcacatctggcgacacggccgtctattattgtgcgaaaggctcaaaacacaggctgcgagattacgctctctacgacgacgacggcgcattgaattgggctgtcgatgttgactacctttcgaacttggaattctggggccaagggaccgccgtcaccgtctcttcagcctctacaaagggccctagcgtgttccctctggctcctagcagcaagtcgacatctggcggaacagccgctctgggctgtctggtcaaggactactttcccgagcctgtgacagtgtcctggaactctggcgctctgacaagcggcgtgcacacatttccagccgtgctgcaaagcagcggcctgtactctctgagcagcgtggtcacagtgccaagctctagcctgggcacccagacctacatctgcaatgtgaaccacaagcctagcaacaccaaggtggacaagaaggtggaacccaagagctgcgacaagacccacacctgtcctccatgtcctgctccagaactgctcggcggaccttccgtgttcctgtttcctccaaagcctaaggacaccctgatgatcagcagaacccctgaagtgacctgcgtggtggtggatgtgtctcacgaggaccccgaagtgaagttcaattggtacgtggacggcgtggaagtgcacaacgccaagaccaagcctagagaggaacagtacaacagcacctacagagtggtgtccgtgctgacagtgctgcaccaggattggctgaacggcaaagagtacaagtgcaaggtgtccaacaaggccctgcctgctcctatcgagaaaaccatcagcaaggccaagggccagcctagggaaccccaggtttacacactgcctccaagccgcgacgaactgaccaagaaccaggtgtccctgacctgcctcgtgaagggcttctacccttccgatatcgccgtggaatgggagagcaatggccagcctgagaacaactacaagacaacccctcctgtgctggacagcgacggctcattcttcctgtacagcaagctgaccgtggacaagtccagatggcagcagggcaacgtgttcagctgtagcgtgctgcacgaagccctgcacagccactacacccagaaaagcctgtctctgagccccggcaaatgataaggatccgatctggtactgcatgcacgcaatgctagctgcccctttcccgtcctgggtaccccgagtctcccccgacctcgggtcccaggtatgctcccacctccacctgccccactcaccacctctgctagttccagacacctcccaagcacgcagcaatgcagctcaaaacgcttagcctagccacacccccacgggaaacagcagtgattaacctttagcaataaacgaaagtttaactaagctatactaaccccagggttggtcaatttcgtgccagccacaccctcgagctagcaaaaaaaaaaaaaaaaaaaaaaaaaaaaaagcatatgactaaaaaaaaaaaaaaaaaaaaaaaaaaaaaaaaaaaaaaaaaaaaaaaaaaaaaaaaaaaaaaaaaaaaaa

SEQ ID NO: 884 - RNA, 1937 nt, synthetic construct
  source 1..1937: mol_type = other RNA
agaataaactagtattcttctggtccccacagactcagagagaacccgccaccatggattggatttggagaatcctgttcctcgtgggcgccgctaccggagcccactcccaggtgcatctgacgcagtctgggcctgaggtgaggaagcctgggacctccgtaaaggtctcctgcaaggcccctggaaacacattgaagacttatgatctacactgggtgcgcagcgtccctggacaaggccttcagtggatgggatggataagccatgagggcgacaagaaggtcattgtggaaagattcaaggccaaagtcaccattgattgggacaggtccaccaatacggcctatctccaactgagcggcctcacatctggcgacacggccgtctattattgtgcgaaaggctcaaaacacaggctgcgagattacgctctctacgacgacgacggcgcattgaattgggctgtcgatgttgactacctttcgaacttggaattctggggccaagggaccgccgtcaccgtctcttcagcctctacaaagggccctagcgtgttccctctggctcctagcagcaagtcgacatctggcggaacagccgctctgggctgtctggtcaaggactactttcccgagcctgtgacagtgtcctggaactctggcgctctgacaagcggcgtgcacacatttccagccgtgctgcaaagcagcggcctgtactctctgagcagcgtggtcacagtgccaagctctagcctgggcacccagacctacatctgcaatgtgaaccacaagcctagcaacaccaaggtggacaagaaggtggaacccaagagctgcgacaagacccacacctgtcctccatgtcctgctccagaactgctcggcggaccttccgtgttcctgtttcctccaaagcctaaggacaccctgatgatcagcagaacccctgaagtgacctgcgtggtggtggatgtgtctcacgaggaccccgaagtgaagttcaattggtacgtggacggcgtggaagtgcacaacgccaagaccaagcctagagaggaacagtacaacagcacctacagagtggtgtccgtgctgacagtgctgcaccaggattggctgaacggcaaagagtacaagtgcaaggtgtccaacaaggccctgcctgctcctatcgagaaaaccatcagcaaggccaagggccagcctcgcgaacctcaagtctgtacactgcctcctagccgcgacgaactgaccaagaaccaggtgtccctgagctgcgccgtgaagggcttttacccttccgatatcgccgtggaatgggagagcaatggccagcctgagaacaactacaagacaacccctcctgtgctggacagcgacggctcattcttcctggtgtccaagctgacagtggacaagagcagatggcagcagggcaacgtgttcagctgcagcgtgctgcatgaagccctgcacagccactacacccagaagtccctgtctctgagccccggcaagtgataaggatccgatctggtactgcatgcacgcaatgctagctgcccctttcccgtcctgggtaccccgagtctcccccgacctcgggtcccaggtatgctcccacctccacctgccccactcaccacctctgctagttccagacacctcccaagcacgcagcaatgcagctcaaaacgcttagcctagccacacccccacgggaaacagcagtgattaacctttagcaataaacgaaagtttaactaagctatactaaccccagggttggtcaatttcgtgccagccacaccctcgagctagcaaaaaaaaaaaaaaaaaaaaaaaaaaaaaagcatatgactaaaaaaaaaaaaaaaaaaaaaaaaaaaaaaaaaaaaaaaaaaaaaaaaaaaaaaaaaaaaaaaaaaaaaa

SEQ ID NO: 885 - RNA, 1937 nt, synthetic construct
  source 1..1937: mol_type = other RNA
agaataaactagtattcttctggtccccacagactcagagagaacccgccaccatggattggatttggagaatcctgttcctcgtgggcgccgctaccggagcccactcccaggtgcatctgacgcagtctgggcctgaggtgaggaagcctgggacctccgtaaaggtctcctgcaaggcccctggaaacacattgaagacttatgatctacactgggtgcgcagcgtccctggacaaggccttcagtggatgggatggataagccatgagggcgacaagaaggtcattgtggaaagattcaaggccaaagtcaccattgattgggacaggtccaccaatacggcctatctccaactgagcggcctcacatctggcgacacggccgtctattattgtgcgaaaggctcaaaacacaggctgcgagattacgctctctacgacgacgacggcgcattgaattgggctgtcgatgttgactacctttcgaacttggaattctggggccaagggaccgccgtcaccgtctcttcagcctctacaaagggccctagcgtgttccctctggctcctagcagcaagtcgacatctggcggaacagccgctctgggctgtctggtcaaggactactttcccgagcctgtgacagtgtcctggaactctggcgctctgacaagcggcgtgcacacatttccagccgtgctgcaaagcagcggcctgtactctctgagcagcgtggtcacagtgccaagctctagcctgggcacccagacctacatctgcaatgtgaaccacaagcctagcaacaccaaggtggacaagaaggtggaacccaagagctgcgacaagacccacacctgtcctccatgtcctgctccagaactgctcggcggaccttccgtgttcctgtttcctccaaagcctaaggacaccctgatgatcagcagaacccctgaagtgacctgcgtggtggtggatgtgtctcacgaggaccccgaagtgaagttcaattggtacgtggacggcgtggaagtgcacaacgccaagaccaagcctagagaggaacagtacaacagcacctacagagtggtgtccgtgctgacagtgctgcaccaggattggctgaacggcaaagagtacaagtgcaaggtgtccaacaaggccctgcctgctcctatcgagaaaaccatcagcaaggccaagggccagcctagggaaccccaggtttacaccctgcctccatgccgcgacgaactgaccaagaaccaggtgtccctgtggtgcctggtcaagggcttctacccttccgatatcgccgtggaatgggagagcaatggccagcctgagaacaactacaagacaacccctcctgtgctggacagcgacggctcattcttcctgtacagcaagctgacagtggacaagagcagatggcagcagggcaacgtgttcagctgcagcgtgctgcatgaagccctgcacagccactacacccagaagtccctgtctctgagccccggcaagtgataaggatccgatctggtactgcatgcacgcaatgctagctgcccctttcccgtcctgggtaccccgagtctcccccgacctcgggtcccaggtatgctcccacctccacctgccccactcaccacctctgctagttccagacacctcccaagcacgcagcaatgcagctcaaaacgcttagcctagccacacccccacgggaaacagcagtgattaacctttagcaataaacgaaagtttaactaagctatactaaccccagggttggtcaatttcgtgccagccacaccctcgagctagcaaaaaaaaaaaaaaaaaaaaaaaaaaaaaagcatatgactaaaaaaaaaaaaaaaaaaaaaaaaaaaaaaaaaaaaaaaaaaaaaaaaaaaaaaaaaaaaaaaaaaaaaa

SEQ ID NO: 886 - RNA, 1937 nt, synthetic construct
  source 1..1937: mol_type = other RNA
agaataaactagtattcttctggtccccacagactcagagagaacccgccaccatggattggatttggagaatcctgttcctcgtgggcgccgctaccggagcccactcccaggtgcatctgacgcagtctgggcctgaggtgaggaagcctgggacctccgtaaaggtctcctgcaaggcccctggaaacacattgaagacttatgatctacactgggtgcgcagcgtccctggacaaggccttcagtggatgggatggataagccatgagggcgacaagaaggtcattgtggaaagattcaaggccaaagtcaccattgattgggacaggtccaccaatacggcctatctccaactgagcggcctcacatctggcgacacggccgtctattattgtgcgaaaggctcaaaacacaggctgcgagattacgctctctacgacgacgacggcgcattgaattgggctgtcgatgttgactacctttcgaacttggaattctggggccaagggaccgccgtcaccgtctcttcagcctctacaaagggccctagcgtgttccctctggctcctagcagcaagtcgacatctggcggaacagccgctctgggctgtctggtcaaggactactttcccgagcctgtgacagtgtcctggaactctggcgctctgacaagcggcgtgcacacatttccagccgtgctgcaaagcagcggcctgtactctctgagcagcgtggtcacagtgccaagctctagcctgggcacccagacctacatctgcaatgtgaaccacaagcctagcaacaccaaggtggacaagaaggtggaacccaagagctgcgacaagacccacacctgtcctccatgtcctgctccagaactgctggccggaccttccgtgttcctgtttcctccaaagcctaaggacaccctgatgatcagcagaacccctgaagtgacctgcgtggtggtggatgtgtctcacgaggaccccgaagtgaagttcaattggtacgtggacggcgtggaagtgcacaatgccaagaccaagcctagagaggaacagtacaacagcacctacagagtggtgtccgtgctgaccgtgctgcaccaggattggctgaacggcaaagagtacaagtgcaaggtgtccaacaaggccctgcctctgcctgaggaaaagaccatcagcaaggccaagggccagcctagggaaccccaggtttacacactgcctccaagccgcgacgaactgaccaagaaccaggtgtccctgacctgcctcgtgaagggcttctacccttccgatatcgccgtggaatgggagagcaatggccagcctgagaacaactacaagacaacccctcctgtgctggacagcgacggctcattcttcctgtacagcaagctgaccgtggacaagtccagatggcagcagggcaacgtgttcagctgtagcgtgctgcacgaagccctgcacagccactacacccagaaaagcctgtctctgagccccggcaaatgataaggatccgatctggtactgcatgcacgcaatgctagctgcccctttcccgtcctgggtaccccgagtctcccccgacctcgggtcccaggtatgctcccacctccacctgccccactcaccacctctgctagttccagacacctcccaagcacgcagcaatgcagctcaaaacgcttagcctagccacacccccacgggaaacagcagtgattaacctttagcaataaacgaaagtttaactaagctatactaaccccagggttggtcaatttcgtgccagccacaccctcgagctagcaaaaaaaaaaaaaaaaaaaaaaaaaaaaaagcatatgactaaaaaaaaaaaaaaaaaaaaaaaaaaaaaaaaaaaaaaaaaaaaaaaaaaaaaaaaaaaaaaaaaaaaaa

SEQ ID NO: 887 - RNA, 1937 nt, synthetic construct
  source 1..1937: mol_type = other RNA
agaataaactagtattcttctggtccccacagactcagagagaacccgccaccatggattggatttggagaatcctgttcctcgtgggcgccgctaccggagcccactcccaggtgcatctgacgcagtctgggcctgaggtgaggaagcctgggacctccgtaaaggtctcctgcaaggcccctggaaacacattgaagacttatgatctacactgggtgcgcagcgtccctggacaaggccttcagtggatgggatggataagccatgagggcgacaagaaggtcattgtggaaagattcaaggccaaagtcaccattgattgggacaggtccaccaatacggcctatctccaactgagcggcctcacatctggcgacacggccgtctattattgtgcgaaaggctcaaaacacaggctgcgagattacgctctctacgacgacgacggcgcattgaattgggctgtcgatgttgactacctttcgaacttggaattctggggccaagggaccgccgtcaccgtctcttcagcctctacaaagggccctagcgtgttccctctggctcctagcagcaagtcgacatctggcggaacagccgctctgggctgtctggtcaaggactactttcccgagcctgtgacagtgtcctggaactctggcgctctgacaagcggcgtgcacacatttccagccgtgctgcaaagcagcggcctgtactctctgagcagcgtggtcacagtgccaagctctagcctgggcacccagacctacatctgcaatgtgaaccacaagcctagcaacaccaaggtggacaagaaggtggaacccaagagctgcgacaagacccacacctgtcctccatgtcctgctccagaactgctggccggaccttccgtgttcctgtttcctccaaagcctaaggacaccctgatgatcagcagaacccctgaagtgacctgcgtggtggtggatgtgtctcacgaggaccctgaagtgaagttcaattggtacgtggacggcgtggaagtgcacaacgccaagaccaagcctagagaggaacagtacaacagcacctacagagtggtgtccgtgctgaccgtgctgcaccaggattggctgaacggcaaagagtacaagtgcaaggtgtccaacaaggccctgcctgcccctgaggaaaagaccatcagcaaggccaagggccagcctagggaaccccaggtttacacactgcctccaagccgcgacgaactgaccaagaaccaggtgtccctgacctgcctcgtgaagggcttctacccttccgatatcgccgtggaatgggagagcaatggccagcctgagaacaactacaagacaacccctcctgtgctggacagcgacggctcattcttcctgtacagcaagctgaccgtggacaagtccagatggcagcagggcaacgtgttcagctgtagcgtgctgcacgaagccctgcacagccactacacccagaaaagcctgtctctgagccccggcaaatgataaggatccgatctggtactgcatgcacgcaatgctagctgcccctttcccgtcctgggtaccccgagtctcccccgacctcgggtcccaggtatgctcccacctccacctgccccactcaccacctctgctagttccagacacctcccaagcacgcagcaatgcagctcaaaacgcttagcctagccacacccccacgggaaacagcagtgattaacctttagcaataaacgaaagtttaactaagctatactaaccccagggttggtcaatttcgtgccagccacaccctcgagctagcaaaaaaaaaaaaaaaaaaaaaaaaaaaaaagcatatgactaaaaaaaaaaaaaaaaaaaaaaaaaaaaaaaaaaaaaaaaaaaaaaaaaaaaaaaaaaaaaaaaaaaaaa

SEQ ID NO: 888 - RNA, 1937 nt, synthetic construct
  source 1..1937: mol_type = other RNA
agaataaactagtattcttctggtccccacagactcagagagaacccgccaccatggattggatttggagaatcctgttcctcgtgggcgccgctaccggagcccactcccaggtgcatctgacgcagtctgggcctgaggtgaggaagcctgggacctccgtaaaggtctcctgcaaggcccctggaaacacattgaagacttatgatctacactgggtgcgcagcgtccctggacaaggccttcagtggatgggatggataagccatgagggcgacaagaaggtcattgtggaaagattcaaggccaaagtcaccattgattgggacaggtccaccaatacggcctatctccaactgagcggcctcacatctggcgacacggccgtctattattgtgcgaaaggctcaaaacacaggctgcgagattacgctctctacgacgacgacggcgcattgaattgggctgtcgatgttgactacctttcgaacttggaattctggggccaagggaccgccgtcaccgtctcttcagcctctacaaagggccctagcgtgttccctctggctcctagcagcaagtcgacatctggcggaacagccgctctgggctgtctggtcaaggactactttcccgagcctgtgacagtgtcctggaactctggcgctctgacaagcggcgtgcacacatttccagccgtgctgcaaagcagcggcctgtactctctgagcagcgtggtcacagtgccaagctctagcctgggcacccagacctacatctgcaatgtgaaccacaagcctagcaacaccaaggtggacaagaaggtggaacccaagagctgcgacaagacccacacctgtcctccatgtcctgctccagaactgctggccggaccttccgtgttcctgtttcctccaaagcctaaggacaccctgatgatcagcagaacccctgaagtgacctgcgtggtggtggatgtgtctcacgaggaccctgaagtgaagttcaattggtacgtggacggcgtggaagtgcacaacgccaagaccaagcctagagaggaacagtacaacagcacctacagagtggtgtccgtgctgaccgtgctgcaccaggattggctgaacggcaaagagtacaagtgcaaggtgtccaacaaggccctgcctgcccctatcgaaaagaccatcagcaaggccaagggccagcctagggaaccccaggtttacacactgcctccaagccgcgacgaactgaccaagaaccaggtgtccctgacctgcctcgtgaagggcttctacccttccgatatcgccgtggaatgggagagcaatggccagcctgagaacaactacaagacaacccctcctgtgctggacagcgacggctcattcttcctgtacagcaagctgaccgtggacaagtccagatggcagcagggcaacgtgttcagctgtagcgtgctgcacgaagccctgcacagccactacacccagaaaagcctgtctctgagccccggcaaatgataaggatccgatctggtactgcatgcacgcaatgctagctgcccctttcccgtcctgggtaccccgagtctcccccgacctcgggtcccaggtatgctcccacctccacctgccccactcaccacctctgctagttccagacacctcccaagcacgcagcaatgcagctcaaaacgcttagcctagccacacccccacgggaaacagcagtgattaacctttagcaataaacgaaagtttaactaagctatactaaccccagggttggtcaatttcgtgccagccacaccctcgagctagcaaaaaaaaaaaaaaaaaaaaaaaaaaaaaagcatatgactaaaaaaaaaaaaaaaaaaaaaaaaaaaaaaaaaaaaaaaaaaaaaaaaaaaaaaaaaaaaaaaaaaaaaa

SEQ ID NO: 889 - RNA, 1937 nt, synthetic construct
  source 1..1937: mol_type = other RNA
agaataaactagtattcttctggtccccacagactcagagagaacccgccaccatggattggatttggagaatcctgttcctcgtgggcgccgctaccggagcccactcccaggtgcatctgacgcagtctgggcctgaggtgaggaagcctgggacctccgtaaaggtctcctgcaaggcccctggaaacacattgaagacttatgatctacactgggtgcgcagcgtccctggacaaggccttcagtggatgggatggataagccatgagggcgacaagaaggtcattgtggaaagattcaaggccaaagtcaccattgattgggacaggtccaccaatacggcctatctccaactgagcggcctcacatctggcgacacggccgtctattattgtgcgaaaggctcaaaacacaggctgcgagattacgctctctacgacgacgacggcgcattgaattgggctgtcgatgttgactacctttcgaacttggaattctggggccaagggaccgccgtcaccgtctcttcagcctctacaaagggccctagcgtgttccctctggctcctagcagcaagtcgacatctggcggaacagccgctctgggctgtctggtcaaggactactttcccgagcctgtgacagtgtcctggaactctggcgctctgacaagcggcgtgcacacatttccagccgtgctgcaaagcagcggcctgtactctctgagcagcgtggtcacagtgccaagctctagcctgggcacccagacctacatctgcaatgtgaaccacaagcctagcaacaccaaggtggacaagaaggtggaacccaagagctgcgacaagacccacacctgtcctccatgtcctgctccagaactgctgggcggaccttccgtgttcctgtttcctccaaagcctaaggacaccctgatgatcagcagaacccctgaagtgacctgcgtggtggtggatgtgtctcacgaggaccctgaagtgaagttcaattggtacgtggacggcgtggaagtgcacaacgccaagaccaagcctagagaggaacagtacaacagcacctacagagtggtgtccgtgctgaccgtgctgcaccaggattggctgaacggcaaagagtacaagtgcaaggtgtccaacaaggccctgcctgcccctgaggaaaagaccatcagcaaggccaagggccagcctagggaaccccaggtttacacactgcctccaagccgcgacgaactgaccaagaaccaggtgtccctgacctgcctcgtgaagggcttctacccttccgatatcgccgtggaatgggagagcaatggccagcctgagaacaactacaagacaacccctcctgtgctggacagcgacggctcattcttcctgtacagcaagctgaccgtggacaagtccagatggcagcagggcaacgtgttcagctgtagcgtgctgcacgaagccctgcacagccactacacccagaaaagcctgtctctgagccccggcaaatgataaggatccgatctggtactgcatgcacgcaatgctagctgcccctttcccgtcctgggtaccccgagtctcccccgacctcgggtcccaggtatgctcccacctccacctgccccactcaccacctctgctagttccagacacctcccaagcacgcagcaatgcagctcaaaacgcttagcctagccacacccccacgggaaacagcagtgattaacctttagcaataaacgaaagtttaactaagctatactaaccccagggttggtcaatttcgtgccagccacaccctcgagctagcaaaaaaaaaaaaaaaaaaaaaaaaaaaaaagcatatgactaaaaaaaaaaaaaaaaaaaaaaaaaaaaaaaaaaaaaaaaaaaaaaaaaaaaaaaaaaaaaaaaaaaaaa

SEQ ID NO: 890 - RNA, 1937 nt, synthetic construct
  source 1..1937: mol_type = other RNA
agaataaactagtattcttctggtccccacagactcagagagaacccgccaccatggattggatttggagaatcctgttcctcgtgggcgccgctaccggagcccactcccaggtgcatctgacgcagtctgggcctgaggtgaggaagcctgggacctccgtaaaggtctcctgcaaggcccctggaaacacattgaagacttatgatctacactgggtgcgcagcgtccctggacaaggccttcagtggatgggatggataagccatgagggcgacaagaaggtcattgtggaaagattcaaggccaaagtcaccattgattgggacaggtccaccaatacggcctatctccaactgagcggcctcacatctggcgacacggccgtctattattgtgcgaaaggctcaaaacacaggctgcgagattacgctctctacgacgacgacggcgcattgaattgggctgtcgatgttgactacctttcgaacttggaattctggggccaagggaccgccgtcaccgtctcttcagcctctacaaagggccctagcgtgttccctctggctcctagcagcaagtcgacatctggcggaacagccgctctgggctgtctggtcaaggactactttcccgagcctgtgacagtgtcctggaactctggcgctctgacaagcggcgtgcacacatttccagccgtgctgcaaagcagcggcctgtactctctgagcagcgtggtcacagtgccaagctctagcctgggcacccagacctacatctgcaatgtgaaccacaagcctagcaacaccaaggtggacaagaaggtggaacccaagagctgcgacaagacccacacctgtcctccatgtcctgctccagaactgctggccggaccttccgtgttcctgtttcctccaaagcctaaggacaccctgatgatcagcagaacccctgaagtgacctgcgtggtggtggatgtgtctcacgaggaccccgaagtgaagttcaattggtacgtggacggcgtggaagtgcacaatgccaagaccaagcctagagaggaacagtacaacagcacctacagagtggtgtccgtgctgaccgtgctgcaccaggattggctgaacggcaaagagtacaagtgcaaggtgtccaacaaggccctgcctctgcctgaggaaaagaccatcagcaaggccaagggccagcctcgcgaacctcaagtctgtacactgcctcctagccgcgacgaactgaccaagaaccaggtgtccctgagctgcgccgtgaagggcttttacccttccgatatcgccgtggaatgggagagcaatggccagcctgagaacaactacaagacaacccctcctgtgctggacagcgacggctcattcttcctggtgtccaagctgacagtggacaagagcagatggcagcagggcaacgtgttcagctgcagcgtgctgcatgaagccctgcacagccactacacccagaagtccctgtctctgagccccggcaagtgataaggatccgatctggtactgcatgcacgcaatgctagctgcccctttcccgtcctgggtaccccgagtctcccccgacctcgggtcccaggtatgctcccacctccacctgccccactcaccacctctgctagttccagacacctcccaagcacgcagcaatgcagctcaaaacgcttagcctagccacacccccacgggaaacagcagtgattaacctttagcaataaacgaaagtttaactaagctatactaaccccagggttggtcaatttcgtgccagccacaccctcgagctagcaaaaaaaaaaaaaaaaaaaaaaaaaaaaaagcatatgactaaaaaaaaaaaaaaaaaaaaaaaaaaaaaaaaaaaaaaaaaaaaaaaaaaaaaaaaaaaaaaaaaaaaaa

SEQ ID NO: 891 - RNA, 1937 nt, synthetic construct
  source 1..1937: mol_type = other RNA
agaataaactagtattcttctggtccccacagactcagagagaacccgccaccatggattggatttggagaatcctgttcctcgtgggcgccgctaccggagcccactcccaggtgcatctgacgcagtctgggcctgaggtgaggaagcctgggacctccgtaaaggtctcctgcaaggcccctggaaacacattgaagacttatgatctacactgggtgcgcagcgtccctggacaaggccttcagtggatgggatggataagccatgagggcgacaagaaggtcattgtggaaagattcaaggccaaagtcaccattgattgggacaggtccaccaatacggcctatctccaactgagcggcctcacatctggcgacacggccgtctattattgtgcgaaaggctcaaaacacaggctgcgagattacgctctctacgacgacgacggcgcattgaattgggctgtcgatgttgactacctttcgaacttggaattctggggccaagggaccgccgtcaccgtctcttcagcctctacaaagggccctagcgtgttccctctggctcctagcagcaagtcgacatctggcggaacagccgctctgggctgtctggtcaaggactactttcccgagcctgtgacagtgtcctggaactctggcgctctgacaagcggcgtgcacacatttccagccgtgctgcaaagcagcggcctgtactctctgagcagcgtggtcacagtgccaagctctagcctgggcacccagacctacatctgcaatgtgaaccacaagcctagcaacaccaaggtggacaagaaggtggaacccaagagctgcgacaagacccacacctgtcctccatgtcctgctccagaactgctggccggaccttccgtgttcctgtttcctccaaagcctaaggacaccctgatgatcagcagaacccctgaagtgacctgcgtggtggtggatgtgtctcacgaggaccctgaagtgaagttcaattggtacgtggacggcgtggaagtgcacaacgccaagaccaagcctagagaggaacagtacaacagcacctacagagtggtgtccgtgctgaccgtgctgcaccaggattggctgaacggcaaagagtacaagtgcaaggtgtccaacaaggccctgcctgcccctgaggaaaagaccatcagcaaggccaagggccagcctcgcgaacctcaagtctgtacactgcctcctagccgcgacgaactgaccaagaaccaggtgtccctgagctgcgccgtgaagggcttttacccttccgatatcgccgtggaatgggagagcaatggccagcctgagaacaactacaagacaacccctcctgtgctggacagcgacggctcattcttcctggtgtccaagctgacagtggacaagagcagatggcagcagggcaacgtgttcagctgcagcgtgctgcatgaagccctgcacagccactacacccagaagtccctgtctctgagccccggcaagtgataaggatccgatctggtactgcatgcacgcaatgctagctgcccctttcccgtcctgggtaccccgagtctcccccgacctcgggtcccaggtatgctcccacctccacctgccccactcaccacctctgctagttccagacacctcccaagcacgcagcaatgcagctcaaaacgcttagcctagccacacccccacgggaaacagcagtgattaacctttagcaataaacgaaagtttaactaagctatactaaccccagggttggtcaatttcgtgccagccacaccctcgagctagcaaaaaaaaaaaaaaaaaaaaaaaaaaaaaagcatatgactaaaaaaaaaaaaaaaaaaaaaaaaaaaaaaaaaaaaaaaaaaaaaaaaaaaaaaaaaaaaaaaaaaaaaa

SEQ ID NO: 892 - RNA, 1937 nt, synthetic construct
  source 1..1937: mol_type = other RNA
agaataaactagtattcttctggtccccacagactcagagagaacccgccaccatggattggatttggagaatcctgttcctcgtgggcgccgctaccggagcccactcccaggtgcatctgacgcagtctgggcctgaggtgaggaagcctgggacctccgtaaaggtctcctgcaaggcccctggaaacacattgaagacttatgatctacactgggtgcgcagcgtccctggacaaggccttcagtggatgggatggataagccatgagggcgacaagaaggtcattgtggaaagattcaaggccaaagtcaccattgattgggacaggtccaccaatacggcctatctccaactgagcggcctcacatctggcgacacggccgtctattattgtgcgaaaggctcaaaacacaggctgcgagattacgctctctacgacgacgacggcgcattgaattgggctgtcgatgttgactacctttcgaacttggaattctggggccaagggaccgccgtcaccgtctcttcagcctctacaaagggccctagcgtgttccctctggctcctagcagcaagtcgacatctggcggaacagccgctctgggctgtctggtcaaggactactttcccgagcctgtgacagtgtcctggaactctggcgctctgacaagcggcgtgcacacatttccagccgtgctgcaaagcagcggcctgtactctctgagcagcgtggtcacagtgccaagctctagcctgggcacccagacctacatctgcaatgtgaaccacaagcctagcaacaccaaggtggacaagaaggtggaacccaagagctgcgacaagacccacacctgtcctccatgtcctgctccagaactgctggccggaccttccgtgttcctgtttcctccaaagcctaaggacaccctgatgatcagcagaacccctgaagtgacctgcgtggtggtggatgtgtctcacgaggaccctgaagtgaagttcaattggtacgtggacggcgtggaagtgcacaacgccaagaccaagcctagagaggaacagtacaacagcacctacagagtggtgtccgtgctgaccgtgctgcaccaggattggctgaacggcaaagagtacaagtgcaaggtgtccaacaaggccctgcctgcccctatcgaaaagaccatcagcaaggccaagggccagcctcgcgaacctcaagtctgtacactgcctcctagccgcgacgaactgaccaagaaccaggtgtccctgagctgcgccgtgaagggcttttacccttccgatatcgccgtggaatgggagagcaatggccagcctgagaacaactacaagacaacccctcctgtgctggacagcgacggctcattcttcctggtgtccaagctgacagtggacaagagcagatggcagcagggcaacgtgttcagctgcagcgtgctgcatgaagccctgcacagccactacacccagaagtccctgtctctgagccccggcaagtgataaggatccgatctggtactgcatgcacgcaatgctagctgcccctttcccgtcctgggtaccccgagtctcccccgacctcgggtcccaggtatgctcccacctccacctgccccactcaccacctctgctagttccagacacctcccaagcacgcagcaatgcagctcaaaacgcttagcctagccacacccccacgggaaacagcagtgattaacctttagcaataaacgaaagtttaactaagctatactaaccccagggttggtcaatttcgtgccagccacaccctcgagctagcaaaaaaaaaaaaaaaaaaaaaaaaaaaaaagcatatgactaaaaaaaaaaaaaaaaaaaaaaaaaaaaaaaaaaaaaaaaaaaaaaaaaaaaaaaaaaaaaaaaaaaaaa

SEQ ID NO: 893 - RNA, 1937 nt, synthetic construct
  source 1..1937: mol_type = other RNA
agaataaactagtattcttctggtccccacagactcagagagaacccgccaccatggattggatttggagaatcctgttcctcgtgggcgccgctaccggagcccactcccaggtgcatctgacgcagtctgggcctgaggtgaggaagcctgggacctccgtaaaggtctcctgcaaggcccctggaaacacattgaagacttatgatctacactgggtgcgcagcgtccctggacaaggccttcagtggatgggatggataagccatgagggcgacaagaaggtcattgtggaaagattcaaggccaaagtcaccattgattgggacaggtccaccaatacggcctatctccaactgagcggcctcacatctggcgacacggccgtctattattgtgcgaaaggctcaaaacacaggctgcgagattacgctctctacgacgacgacggcgcattgaattgggctgtcgatgttgactacctttcgaacttggaattctggggccaagggaccgccgtcaccgtctcttcagcctctacaaagggccctagcgtgttccctctggctcctagcagcaagtcgacatctggcggaacagccgctctgggctgtctggtcaaggactactttcccgagcctgtgacagtgtcctggaactctggcgctctgacaagcggcgtgcacacatttccagccgtgctgcaaagcagcggcctgtactctctgagcagcgtggtcacagtgccaagctctagcctgggcacccagacctacatctgcaatgtgaaccacaagcctagcaacaccaaggtggacaagaaggtggaacccaagagctgcgacaagacccacacctgtcctccatgtcctgctccagaactgctgggcggaccttccgtgttcctgtttcctccaaagcctaaggacaccctgatgatcagcagaacccctgaagtgacctgcgtggtggtggatgtgtctcacgaggaccctgaagtgaagttcaattggtacgtggacggcgtggaagtgcacaacgccaagaccaagcctagagaggaacagtacaacagcacctacagagtggtgtccgtgctgaccgtgctgcaccaggattggctgaacggcaaagagtacaagtgcaaggtgtccaacaaggccctgcctgcccctgaggaaaagaccatcagcaaggccaagggccagcctcgcgaacctcaagtctgtacactgcctcctagccgcgacgaactgaccaagaaccaggtgtccctgagctgcgccgtgaagggcttttacccttccgatatcgccgtggaatgggagagcaatggccagcctgagaacaactacaagacaacccctcctgtgctggacagcgacggctcattcttcctggtgtccaagctgacagtggacaagagcagatggcagcagggcaacgtgttcagctgcagcgtgctgcatgaagccctgcacagccactacacccagaagtccctgtctctgagccccggcaagtgataaggatccgatctggtactgcatgcacgcaatgctagctgcccctttcccgtcctgggtaccccgagtctcccccgacctcgggtcccaggtatgctcccacctccacctgccccactcaccacctctgctagttccagacacctcccaagcacgcagcaatgcagctcaaaacgcttagcctagccacacccccacgggaaacagcagtgattaacctttagcaataaacgaaagtttaactaagctatactaaccccagggttggtcaatttcgtgccagccacaccctcgagctagcaaaaaaaaaaaaaaaaaaaaaaaaaaaaaagcatatgactaaaaaaaaaaaaaaaaaaaaaaaaaaaaaaaaaaaaaaaaaaaaaaaaaaaaaaaaaaaaaaaaaaaaaa

SEQ ID NO: 894 - RNA, 1937 nt, synthetic construct
  source 1..1937: mol_type = other RNA
agaataaactagtattcttctggtccccacagactcagagagaacccgccaccatggattggatttggagaatcctgttcctcgtgggcgccgctaccggagcccactcccaggtgcatctgacgcagtctgggcctgaggtgaggaagcctgggacctccgtaaaggtctcctgcaaggcccctggaaacacattgaagacttatgatctacactgggtgcgcagcgtccctggacaaggccttcagtggatgggatggataagccatgagggcgacaagaaggtcattgtggaaagattcaaggccaaagtcaccattgattgggacaggtccaccaatacggcctatctccaactgagcggcctcacatctggcgacacggccgtctattattgtgcgaaaggctcaaaacacaggctgcgagattacgctctctacgacgacgacggcgcattgaattgggctgtcgatgttgactacctttcgaacttggaattctggggccaagggaccgccgtcaccgtctcttcagcctctacaaagggccctagcgtgttccctctggctcctagcagcaagtcgacatctggcggaacagccgctctgggctgtctggtcaaggactactttcccgagcctgtgacagtgtcctggaactctggcgctctgacaagcggcgtgcacacatttccagccgtgctgcaaagcagcggcctgtactctctgagcagcgtggtcacagtgccaagctctagcctgggcacccagacctacatctgcaatgtgaaccacaagcctagcaacaccaaggtggacaagaaggtggaacccaagagctgcgacaagacccacacctgtcctccatgtcctgctccagaactgctggccggaccttccgtgttcctgtttcctccaaagcctaaggacaccctgatgatcagcagaacccctgaagtgacctgcgtggtggtggatgtgtctcacgaggaccccgaagtgaagttcaattggtacgtggacggcgtggaagtgcacaatgccaagaccaagcctagagaggaacagtacaacagcacctacagagtggtgtccgtgctgaccgtgctgcaccaggattggctgaacggcaaagagtacaagtgcaaggtgtccaacaaggccctgcctctgcctgaggaaaagaccatcagcaaggccaagggccagcctagggaaccccaggtttacaccctgcctccatgccgcgacgaactgaccaagaaccaggtgtccctgtggtgcctggtcaagggcttctacccttccgatatcgccgtggaatgggagagcaatggccagcctgagaacaactacaagacaacccctcctgtgctggacagcgacggctcattcttcctgtacagcaagctgacagtggacaagagcagatggcagcagggcaacgtgttcagctgcagcgtgctgcatgaagccctgcacagccactacacccagaagtccctgtctctgagccccggcaagtgataaggatccgatctggtactgcatgcacgcaatgctagctgcccctttcccgtcctgggtaccccgagtctcccccgacctcgggtcccaggtatgctcccacctccacctgccccactcaccacctctgctagttccagacacctcccaagcacgcagcaatgcagctcaaaacgcttagcctagccacacccccacgggaaacagcagtgattaacctttagcaataaacgaaagtttaactaagctatactaaccccagggttggtcaatttcgtgccagccacaccctcgagctagcaaaaaaaaaaaaaaaaaaaaaaaaaaaaaagcatatgactaaaaaaaaaaaaaaaaaaaaaaaaaaaaaaaaaaaaaaaaaaaaaaaaaaaaaaaaaaaaaaaaaaaaaa

SEQ ID NO: 895 - RNA, 1937 nt, synthetic construct
  source 1..1937: mol_type = other RNA
agaataaactagtattcttctggtccccacagactcagagagaacccgccaccatggattggatttggagaatcctgttcctcgtgggcgccgctaccggagcccactcccaggtgcatctgacgcagtctgggcctgaggtgaggaagcctgggacctccgtaaaggtctcctgcaaggcccctggaaacacattgaagacttatgatctacactgggtgcgcagcgtccctggacaaggccttcagtggatgggatggataagccatgagggcgacaagaaggtcattgtggaaagattcaaggccaaagtcaccattgattgggacaggtccaccaatacggcctatctccaactgagcggcctcacatctggcgacacggccgtctattattgtgcgaaaggctcaaaacacaggctgcgagattacgctctctacgacgacgacggcgcattgaattgggctgtcgatgttgactacctttcgaacttggaattctggggccaagggaccgccgtcaccgtctcttcagcctctacaaagggccctagcgtgttccctctggctcctagcagcaagtcgacatctggcggaacagccgctctgggctgtctggtcaaggactactttcccgagcctgtgacagtgtcctggaactctggcgctctgacaagcggcgtgcacacatttccagccgtgctgcaaagcagcggcctgtactctctgagcagcgtggtcacagtgccaagctctagcctgggcacccagacctacatctgcaatgtgaaccacaagcctagcaacaccaaggtggacaagaaggtggaacccaagagctgcgacaagacccacacctgtcctccatgtcctgctccagaactgctggccggaccttccgtgttcctgtttcctccaaagcctaaggacaccctgatgatcagcagaacccctgaagtgacctgcgtggtggtggatgtgtctcacgaggaccctgaagtgaagttcaattggtacgtggacggcgtggaagtgcacaacgccaagaccaagcctagagaggaacagtacaacagcacctacagagtggtgtccgtgctgaccgtgctgcaccaggattggctgaacggcaaagagtacaagtgcaaggtgtccaacaaggccctgcctgcccctgaggaaaagaccatcagcaaggccaagggccagcctagggaaccccaggtttacaccctgcctccatgccgcgacgaactgaccaagaaccaggtgtccctgtggtgcctggtcaagggcttctacccttccgatatcgccgtggaatgggagagcaatggccagcctgagaacaactacaagacaacccctcctgtgctggacagcgacggctcattcttcctgtacagcaagctgacagtggacaagagcagatggcagcagggcaacgtgttcagctgcagcgtgctgcatgaagccctgcacagccactacacccagaagtccctgtctctgagccccggcaagtgataaggatccgatctggtactgcatgcacgcaatgctagctgcccctttcccgtcctgggtaccccgagtctcccccgacctcgggtcccaggtatgctcccacctccacctgccccactcaccacctctgctagttccagacacctcccaagcacgcagcaatgcagctcaaaacgcttagcctagccacacccccacgggaaacagcagtgattaacctttagcaataaacgaaagtttaactaagctatactaaccccagggttggtcaatttcgtgccagccacaccctcgagctagcaaaaaaaaaaaaaaaaaaaaaaaaaaaaaagcatatgactaaaaaaaaaaaaaaaaaaaaaaaaaaaaaaaaaaaaaaaaaaaaaaaaaaaaaaaaaaaaaaaaaaaaaa

SEQ ID NO: 896 - RNA, 1937 nt, synthetic construct
  source 1..1937: mol_type = other RNA
agaataaactagtattcttctggtccccacagactcagagagaacccgccaccatggattggatttggagaatcctgttcctcgtgggcgccgctaccggagcccactcccaggtgcatctgacgcagtctgggcctgaggtgaggaagcctgggacctccgtaaaggtctcctgcaaggcccctggaaacacattgaagacttatgatctacactgggtgcgcagcgtccctggacaaggccttcagtggatgggatggataagccatgagggcgacaagaaggtcattgtggaaagattcaaggccaaagtcaccattgattgggacaggtccaccaatacggcctatctccaactgagcggcctcacatctggcgacacggccgtctattattgtgcgaaaggctcaaaacacaggctgcgagattacgctctctacgacgacgacggcgcattgaattgggctgtcgatgttgactacctttcgaacttggaattctggggccaagggaccgccgtcaccgtctcttcagcctctacaaagggccctagcgtgttccctctggctcctagcagcaagtcgacatctggcggaacagccgctctgggctgtctggtcaaggactactttcccgagcctgtgacagtgtcctggaactctggcgctctgacaagcggcgtgcacacatttccagccgtgctgcaaagcagcggcctgtactctctgagcagcgtggtcacagtgccaagctctagcctgggcacccagacctacatctgcaatgtgaaccacaagcctagcaacaccaaggtggacaagaaggtggaacccaagagctgcgacaagacccacacctgtcctccatgtcctgctccagaactgctggccggaccttccgtgttcctgtttcctccaaagcctaaggacaccctgatgatcagcagaacccctgaagtgacctgcgtggtggtggatgtgtctcacgaggaccctgaagtgaagttcaattggtacgtggacggcgtggaagtgcacaacgccaagaccaagcctagagaggaacagtacaacagcacctacagagtggtgtccgtgctgaccgtgctgcaccaggattggctgaacggcaaagagtacaagtgcaaggtgtccaacaaggccctgcctgcccctatcgaaaagaccatcagcaaggccaagggccagcctagggaaccccaggtttacaccctgcctccatgccgcgacgaactgaccaagaaccaggtgtccctgtggtgcctggtcaagggcttctacccttccgatatcgccgtggaatgggagagcaatggccagcctgagaacaactacaagacaacccctcctgtgctggacagcgacggctcattcttcctgtacagcaagctgacagtggacaagagcagatggcagcagggcaacgtgttcagctgcagcgtgctgcatgaagccctgcacagccactacacccagaagtccctgtctctgagccccggcaagtgataaggatccgatctggtactgcatgcacgcaatgctagctgcccctttcccgtcctgggtaccccgagtctcccccgacctcgggtcccaggtatgctcccacctccacctgccccactcaccacctctgctagttccagacacctcccaagcacgcagcaatgcagctcaaaacgcttagcctagccacacccccacgggaaacagcagtgattaacctttagcaataaacgaaagtttaactaagctatactaaccccagggttggtcaatttcgtgccagccacaccctcgagctagcaaaaaaaaaaaaaaaaaaaaaaaaaaaaaagcatatgactaaaaaaaaaaaaaaaaaaaaaaaaaaaaaaaaaaaaaaaaaaaaaaaaaaaaaaaaaaaaaaaaaaaaaa

SEQ ID NO: 897 - RNA, 1937 nt, synthetic construct
  source 1..1937: mol_type = other RNA
agaataaactagtattcttctggtccccacagactcagagagaacccgccaccatggattggatttggagaatcctgttcctcgtgggcgccgctaccggagcccactcccaggtgcatctgacgcagtctgggcctgaggtgaggaagcctgggacctccgtaaaggtctcctgcaaggcccctggaaacacattgaagacttatgatctacactgggtgcgcagcgtccctggacaaggccttcagtggatgggatggataagccatgagggcgacaagaaggtcattgtggaaagattcaaggccaaagtcaccattgattgggacaggtccaccaatacggcctatctccaactgagcggcctcacatctggcgacacggccgtctattattgtgcgaaaggctcaaaacacaggctgcgagattacgctctctacgacgacgacggcgcattgaattgggctgtcgatgttgactacctttcgaacttggaattctggggccaagggaccgccgtcaccgtctcttcagcctctacaaagggccctagcgtgttccctctggctcctagcagcaagtcgacatctggcggaacagccgctctgggctgtctggtcaaggactactttcccgagcctgtgacagtgtcctggaactctggcgctctgacaagcggcgtgcacacatttccagccgtgctgcaaagcagcggcctgtactctctgagcagcgtggtcacagtgccaagctctagcctgggcacccagacctacatctgcaatgtgaaccacaagcctagcaacaccaaggtggacaagaaggtggaacccaagagctgcgacaagacccacacctgtcctccatgtcctgctccagaactgctgggcggaccttccgtgttcctgtttcctccaaagcctaaggacaccctgatgatcagcagaacccctgaagtgacctgcgtggtggtggatgtgtctcacgaggaccctgaagtgaagttcaattggtacgtggacggcgtggaagtgcacaacgccaagaccaagcctagagaggaacagtacaacagcacctacagagtggtgtccgtgctgaccgtgctgcaccaggattggctgaacggcaaagagtacaagtgcaaggtgtccaacaaggccctgcctgcccctgaggaaaagaccatcagcaaggccaagggccagcctagggaaccccaggtttacaccctgcctccatgccgcgacgaactgaccaagaaccaggtgtccctgtggtgcctggtcaagggcttctacccttccgatatcgccgtggaatgggagagcaatggccagcctgagaacaactacaagacaacccctcctgtgctggacagcgacggctcattcttcctgtacagcaagctgacagtggacaagagcagatggcagcagggcaacgtgttcagctgcagcgtgctgcatgaagccctgcacagccactacacccagaagtccctgtctctgagccccggcaagtgataaggatccgatctggtactgcatgcacgcaatgctagctgcccctttcccgtcctgggtaccccgagtctcccccgacctcgggtcccaggtatgctcccacctccacctgccccactcaccacctctgctagttccagacacctcccaagcacgcagcaatgcagctcaaaacgcttagcctagccacacccccacgggaaacagcagtgattaacctttagcaataaacgaaagtttaactaagctatactaaccccagggttggtcaatttcgtgccagccacaccctcgagctagcaaaaaaaaaaaaaaaaaaaaaaaaaaaaaagcatatgactaaaaaaaaaaaaaaaaaaaaaaaaaaaaaaaaaaaaaaaaaaaaaaaaaaaaaaaaaaaaaaaaaaaaaa

SEQ ID NO: 898 - RNA, 1181 nt, synthetic construct
  source 1..1181: mol_type = other RNA
agaataaactagtattcttctggtccccacagactcagagagaacccgccaccatggattggatttggagaatcctgttcctcgtgggcgccgctaccggagcccactccgattttgtcctgactcagtctccacactctctgtccgtcacccctggagagtcggcctccatctcctgcaagtctagtcacagcctcattcatggtgataggaacaattatttggcttggtacgtacagaagccagggcggtctccacaactcctgatctatttggcttccagtcgggcctccggggtccctgacaggttcagtggcagtggatcggacaaagattttacactgaagatcagcagagtggagactgaggatgttgggacgtattactgcatgcaaggtcgagaaagtccctggacgttcggccaagggaccaaggtggacatcaaacgtacggtggccgctcctagcgtgttcatctttccacctagcgacgagcagctgaagtctggcacagcctctgtcgtgtgcctgctcaacaacttctaccccagagaagccaaggtgcagtggaaggtggacaacgccctgcagagcggcaatagccaagagagcgtgaccgagcaggacagcaaggactctacctacagcctgagcagcacactgaccctgagcaaggccgactacgagaagcacaaagtgtacgcctgcgaagtgacccaccagggcctttctagccctgtgaccaagagcttcaaccggggcgagtgctgataaggatccgatctggtactgcatgcacgcaatgctagctgcccctttcccgtcctgggtaccccgagtctcccccgacctcgggtcccaggtatgctcccacctccacctgccccactcaccacctctgctagttccagacacctcccaagcacgcagcaatgcagctcaaaacgcttagcctagccacacccccacgggaaacagcagtgattaacctttagcaataaacgaaagtttaactaagctatactaaccccagggttggtcaatttcgtgccagccacaccctcgagctagcaaaaaaaaaaaaaaaaaaaaaaaaaaaaaagcatatgactaaaaaaaaaaaaaaaaaaaaaaaaaaaaaaaaaaaaaaaaaaaaaaaaaaaaaaaaaaaaaaaaaaaaaa

SEQ ID NO: 899 - RNA, 1949 nt, synthetic construct
  source 1..1949: mol_type = other RNA
agaataaactagtattcttctggtccccacagactcagagagaacccgccaccatggattggatctggcgcatcctgtttctcgtgggagctgccacaggcgcccactctcaagttcacctgacacagtctggccccgaagtgcggaagcctggcacaagcgtgaaggtgtcctgtaaagcccctggcaacaccctgaaaacctacgacctgcactgggtccgatctgtgcctggacaaggactgcagtggatgggctggattagccacgagggcgacaagaaagtgatcgtggaacggttcaaggccaaagtgaccatcgactgggacagaagcaccaacaccgcctacctgcagctgagcggactgacatctggcgataccgccgtgtactactgtgccaagggcagcaagcaccggctgagagattacgccctgtacgacgatgacggcgccctgaattgggccgtcgatgtggactacctgagcaacctggaattctggggccagggaacagccgtgacagtgtctagtgcatctgtggccgctcctagcgtgttcatcttcccacctagcgacgaggaactgaagtctggcacagccagcgtcgtgtgcctgctgaacaacttctaccccagagaagccaaggtgcagtggaaggtggacaacgccctgcagagcggcaatagccaagagagcgtgaccgagcaggacagcaaggactctacctacagcctgagcagcaccctgacactgagcaaggccgactacgagaagcacaaagtgtacgcctgcgaagtgacccaccagggcctttctagccctgtgaccaagagcttcaaccggggcgagtgcgataagacccacacctgtcctccatgtccagctccagaactgctcggcggaccttccgtgttcctgtttcctccaaagcctaaggacaccctgatgatcagcagaacccctgaagtgacctgcgtggtggtggatgtgtctcacgaggaccccgaagtgaagttcaattggtacgtggacggcgtggaagtgcacaacgccaagaccaagcctagagaggaacagtacaacagcacctacagagtggtgtccgtgctgacagtgctgcaccaggattggctgaacggcaaagagtacaagtgcaaggtgtccaacaaggccctgcctgctcctatcgagaaaaccatcagcaaggccaagggccagcctagggaaccccaggtttacacactgcctccaagccgcgaggaaatgaccaagaaccaggtgtccctgacctgcctcgtgaagggcttctacccttccgatatcgccgtggaatgggagagcaatggccagcctgagaacaactacaagacaacccctcctgtgctggacagcgacggctcattcttcctgtacagcaagctgactgtggataagtcccggtggcagcagggcaacgtgttcagctgttctgtgatgcacgaagccctgcacaaccactacacccagaaaagcctgtctctgagccccggcaagtgataaggatccgatctggtactgcatgcacgcaatgctagctgcccctttcccgtcctgggtaccccgagtctcccccgacctcgggtcccaggtatgctcccacctccacctgccccactcaccacctctgctagttccagacacctcccaagcacgcagcaatgcagctcaaaacgcttagcctagccacacccccacgggaaacagcagtgattaacctttagcaataaacgaaagtttaactaagctatactaaccccagggttggtcaatttcgtgccagccacaccctcgagctagcaaaaaaaaaaaaaaaaaaaaaaaaaaaaaagcatatgactaaaaaaaaaaaaaaaaaaaaaaaaaaaaaaaaaaaaaaaaaaaaaaaaaaaaaaaaaaaaaaaaaaaaaa

SEQ ID NO: 900 - RNA, 1949 nt, synthetic construct
  source 1..1949: mol_type = other RNA
agaataaactagtattcttctggtccccacagactcagagagaacccgccaccatggattggatctggcgcatcctgtttctcgtgggagctgccacaggcgcccactctcaagttcacctgacacagtctggccccgaagtgcggaagcctggcacaagcgtgaaggtgtcctgtaaagcccctggcaacaccctgaaaacctacgacctgcactgggtccgatctgtgcctggacaaggactgcagtggatgggctggattagccacgagggcgacaagaaagtgatcgtggaacggttcaaggccaaagtgaccatcgactgggacagaagcaccaacaccgcctacctgcagctgagcggactgacatctggcgataccgccgtgtactactgtgccaagggcagcaagcaccggctgagagattacgccctgtacgacgatgacggcgccctgaattgggccgtcgatgtggactacctgagcaacctggaattctggggccagggaacagccgtgacagtgtctagtgcatctgtggccgctcctagcgtgttcatcttcccacctagcgacgaggaactgaagtctggcacagccagcgtcgtgtgcctgctgaacaacttctaccccagagaagccaaggtgcagtggaaggtggacaacgccctgcagagcggcaatagccaagagagcgtgaccgagcaggacagcaaggactctacctacagcctgagcagcaccctgacactgagcaaggccgactacgagaagcacaaagtgtacgcctgcgaagtgacccaccagggcctttctagccctgtgaccaagagcttcaaccggggcgagtgcgataagacccacacctgtcctccatgtccagctccagaactgctcggcggaccttccgtgttcctgtttcctccaaagcctaaggacaccctgatgatcagcagaacccctgaagtgacctgcgtggtggtggatgtgtctcacgaggaccccgaagtgaagttcaattggtacgtggacggcgtggaagtgcacaacgccaagaccaagcctagagaggaacagtacaacagcacctacagagtggtgtccgtgctgacagtgctgcaccaggattggctgaacggcaaagagtacaagtgcaaggtgtccaacaaggccctgcctgctcctatcgagaaaaccatcagcaaggccaagggccagcctagggaaccccaggtttacacactgcctccaagccgcgaggaaatgaccaagaaccaggtgtccctgacctgcctcgtgaagggcttctacccttccgatatcgccgtggaatgggagagcaatggccagcctgagaacaactacaagacaacccctcctgtgctggacagcgacggctcattcttcctgtacagcaagctgaccgtggacaagtccagatggcagcagggcaacgtgttcagctgtagcgtgctgcacgaagccctgcacagccactacacccagaaaagcctgtctctgagccccggcaaatgataaggatccgatctggtactgcatgcacgcaatgctagctgcccctttcccgtcctgggtaccccgagtctcccccgacctcgggtcccaggtatgctcccacctccacctgccccactcaccacctctgctagttccagacacctcccaagcacgcagcaatgcagctcaaaacgcttagcctagccacacccccacgggaaacagcagtgattaacctttagcaataaacgaaagtttaactaagctatactaaccccagggttggtcaatttcgtgccagccacaccctcgagctagcaaaaaaaaaaaaaaaaaaaaaaaaaaaaaagcatatgactaaaaaaaaaaaaaaaaaaaaaaaaaaaaaaaaaaaaaaaaaaaaaaaaaaaaaaaaaaaaaaaaaaaaaa

SEQ ID NO: 901 - RNA, 1949 nt, synthetic construct
  source 1..1949: mol_type = other RNA
agaataaactagtattcttctggtccccacagactcagagagaacccgccaccatggattggatctggcgcatcctgtttctcgtgggagctgccacaggcgcccactctcaagttcacctgacacagtctggccccgaagtgcggaagcctggcacaagcgtgaaggtgtcctgtaaagcccctggcaacaccctgaaaacctacgacctgcactgggtccgatctgtgcctggacaaggactgcagtggatgggctggattagccacgagggcgacaagaaagtgatcgtggaacggttcaaggccaaagtgaccatcgactgggacagaagcaccaacaccgcctacctgcagctgagcggactgacatctggcgataccgccgtgtactactgtgccaagggcagcaagcaccggctgagagattacgccctgtacgacgatgacggcgccctgaattgggccgtcgatgtggactacctgagcaacctggaattctggggccagggaacagccgtgacagtgtctagtgcatctgtggccgctcctagcgtgttcatcttcccacctagcgacgaggaactgaagtctggcacagccagcgtcgtgtgcctgctgaacaacttctaccccagagaagccaaggtgcagtggaaggtggacaacgccctgcagagcggcaatagccaagagagcgtgaccgagcaggacagcaaggactctacctacagcctgagcagcaccctgacactgagcaaggccgactacgagaagcacaaagtgtacgcctgcgaagtgacccaccagggcctttctagccctgtgaccaagagcttcaaccggggcgagtgcgataagacccacacctgtcctccatgtccagctccagaactgctggccggaccttccgtgttcctgtttcctccaaagcctaaggacaccctgatgatcagcagaacccctgaagtgacctgcgtggtggtggatgtgtctcacgaggaccccgaagtgaagttcaattggtacgtggacggcgtggaagtgcacaatgccaagaccaagcctagagaggaacagtacaacagcacctacagagtggtgtccgtgctgaccgtgctgcaccaggattggctgaacggcaaagagtacaagtgcaaggtgtccaacaaggccctgcctctgcctgaggaaaagaccatcagcaaggccaagggccagcctagggaaccccaggtttacacactgcctccaagccgcgaggaaatgaccaagaaccaggtgtccctgacctgcctcgtgaagggcttctacccttccgatatcgccgtggaatgggagagcaatggccagcctgagaacaactacaagacaacccctcctgtgctggacagcgacggctcattcttcctgtacagcaagctgaccgtggacaagtccagatggcagcagggcaacgtgttcagctgtagcgtgctgcacgaagccctgcacagccactacacccagaaaagcctgtctctgagccccggcaaatgataaggatccgatctggtactgcatgcacgcaatgctagctgcccctttcccgtcctgggtaccccgagtctcccccgacctcgggtcccaggtatgctcccacctccacctgccccactcaccacctctgctagttccagacacctcccaagcacgcagcaatgcagctcaaaacgcttagcctagccacacccccacgggaaacagcagtgattaacctttagcaataaacgaaagtttaactaagctatactaaccccagggttggtcaatttcgtgccagccacaccctcgagctagcaaaaaaaaaaaaaaaaaaaaaaaaaaaaaagcatatgactaaaaaaaaaaaaaaaaaaaaaaaaaaaaaaaaaaaaaaaaaaaaaaaaaaaaaaaaaaaaaaaaaaaaaa

SEQ ID NO: 902 - RNA, 1949 nt, synthetic construct
  source 1..1949: mol_type = other RNA
agaataaactagtattcttctggtccccacagactcagagagaacccgccaccatggattggatctggcgcatcctgtttctcgtgggagctgccacaggcgcccactctcaagttcacctgacacagtctggccccgaagtgcggaagcctggcacaagcgtgaaggtgtcctgtaaagcccctggcaacaccctgaaaacctacgacctgcactgggtccgatctgtgcctggacaaggactgcagtggatgggctggattagccacgagggcgacaagaaagtgatcgtggaacggttcaaggccaaagtgaccatcgactgggacagaagcaccaacaccgcctacctgcagctgagcggactgacatctggcgataccgccgtgtactactgtgccaagggcagcaagcaccggctgagagattacgccctgtacgacgatgacggcgccctgaattgggccgtcgatgtggactacctgagcaacctggaattctggggccagggaacagccgtgacagtgtctagtgcatctgtggccgctcctagcgtgttcatcttcccacctagcgacgaggaactgaagtctggcacagccagcgtcgtgtgcctgctgaacaacttctaccccagagaagccaaggtgcagtggaaggtggacaacgccctgcagagcggcaatagccaagagagcgtgaccgagcaggacagcaaggactctacctacagcctgagcagcaccctgacactgagcaaggccgactacgagaagcacaaagtgtacgcctgcgaagtgacccaccagggcctttctagccctgtgaccaagagcttcaaccggggcgagtgcgataagacccacacctgtcctccatgtccagctccagaactgctggccggaccttccgtgttcctgtttcctccaaagcctaaggacaccctgatgatcagcagaacccctgaagtgacctgcgtggtggtggatgtgtctcacgaggaccctgaagtgaagttcaattggtacgtggacggcgtggaagtgcacaacgccaagaccaagcctagagaggaacagtacaacagcacctacagagtggtgtccgtgctgaccgtgctgcaccaggattggctgaacggcaaagagtacaagtgcaaggtgtccaacaaggccctgcctgcccctgaggaaaagaccatcagcaaggccaagggccagcctagggaaccccaggtttacacactgcctccaagccgcgaggaaatgaccaagaaccaggtgtccctgacctgcctcgtgaagggcttctacccttccgatatcgccgtggaatgggagagcaatggccagcctgagaacaactacaagacaacccctcctgtgctggacagcgacggctcattcttcctgtacagcaagctgaccgtggacaagtccagatggcagcagggcaacgtgttcagctgtagcgtgctgcacgaagccctgcacagccactacacccagaaaagcctgtctctgagccccggcaaatgataaggatccgatctggtactgcatgcacgcaatgctagctgcccctttcccgtcctgggtaccccgagtctcccccgacctcgggtcccaggtatgctcccacctccacctgccccactcaccacctctgctagttccagacacctcccaagcacgcagcaatgcagctcaaaacgcttagcctagccacacccccacgggaaacagcagtgattaacctttagcaataaacgaaagtttaactaagctatactaaccccagggttggtcaatttcgtgccagccacaccctcgagctagcaaaaaaaaaaaaaaaaaaaaaaaaaaaaaagcatatgactaaaaaaaaaaaaaaaaaaaaaaaaaaaaaaaaaaaaaaaaaaaaaaaaaaaaaaaaaaaaaaaaaaaaaa

SEQ ID NO: 903 - RNA, 1949 nt, synthetic construct
  source 1..1949: mol_type = other RNA
agaataaactagtattcttctggtccccacagactcagagagaacccgccaccatggattggatctggcgcatcctgtttctcgtgggagctgccacaggcgcccactctcaagttcacctgacacagtctggccccgaagtgcggaagcctggcacaagcgtgaaggtgtcctgtaaagcccctggcaacaccctgaaaacctacgacctgcactgggtccgatctgtgcctggacaaggactgcagtggatgggctggattagccacgagggcgacaagaaagtgatcgtggaacggttcaaggccaaagtgaccatcgactgggacagaagcaccaacaccgcctacctgcagctgagcggactgacatctggcgataccgccgtgtactactgtgccaagggcagcaagcaccggctgagagattacgccctgtacgacgatgacggcgccctgaattgggccgtcgatgtggactacctgagcaacctggaattctggggccagggaacagccgtgacagtgtctagtgcatctgtggccgctcctagcgtgttcatcttcccacctagcgacgaggaactgaagtctggcacagccagcgtcgtgtgcctgctgaacaacttctaccccagagaagccaaggtgcagtggaaggtggacaacgccctgcagagcggcaatagccaagagagcgtgaccgagcaggacagcaaggactctacctacagcctgagcagcaccctgacactgagcaaggccgactacgagaagcacaaagtgtacgcctgcgaagtgacccaccagggcctttctagccctgtgaccaagagcttcaaccggggcgagtgcgataagacccacacctgtcctccatgtccagctccagaactgctggccggaccttccgtgttcctgtttcctccaaagcctaaggacaccctgatgatcagcagaacccctgaagtgacctgcgtggtggtggatgtgtctcacgaggaccctgaagtgaagttcaattggtacgtggacggcgtggaagtgcacaacgccaagaccaagcctagagaggaacagtacaacagcacctacagagtggtgtccgtgctgaccgtgctgcaccaggattggctgaacggcaaagagtacaagtgcaaggtgtccaacaaggccctgcctgcccctatcgaaaagaccatcagcaaggccaagggccagcctagggaaccccaggtttacacactgcctccaagccgcgaggaaatgaccaagaaccaggtgtccctgacctgcctcgtgaagggcttctacccttccgatatcgccgtggaatgggagagcaatggccagcctgagaacaactacaagacaacccctcctgtgctggacagcgacggctcattcttcctgtacagcaagctgaccgtggacaagtccagatggcagcagggcaacgtgttcagctgtagcgtgctgcacgaagccctgcacagccactacacccagaaaagcctgtctctgagccccggcaaatgataaggatccgatctggtactgcatgcacgcaatgctagctgcccctttcccgtcctgggtaccccgagtctcccccgacctcgggtcccaggtatgctcccacctccacctgccccactcaccacctctgctagttccagacacctcccaagcacgcagcaatgcagctcaaaacgcttagcctagccacacccccacgggaaacagcagtgattaacctttagcaataaacgaaagtttaactaagctatactaaccccagggttggtcaatttcgtgccagccacaccctcgagctagcaaaaaaaaaaaaaaaaaaaaaaaaaaaaaagcatatgactaaaaaaaaaaaaaaaaaaaaaaaaaaaaaaaaaaaaaaaaaaaaaaaaaaaaaaaaaaaaaaaaaaaaaa

SEQ ID NO: 904 - RNA, 1949 nt, synthetic construct
  source 1..1949: mol_type = other RNA
agaataaactagtattcttctggtccccacagactcagagagaacccgccaccatggattggatctggcgcatcctgtttctcgtgggagctgccacaggcgcccactctcaagttcacctgacacagtctggccccgaagtgcggaagcctggcacaagcgtgaaggtgtcctgtaaagcccctggcaacaccctgaaaacctacgacctgcactgggtccgatctgtgcctggacaaggactgcagtggatgggctggattagccacgagggcgacaagaaagtgatcgtggaacggttcaaggccaaagtgaccatcgactgggacagaagcaccaacaccgcctacctgcagctgagcggactgacatctggcgataccgccgtgtactactgtgccaagggcagcaagcaccggctgagagattacgccctgtacgacgatgacggcgccctgaattgggccgtcgatgtggactacctgagcaacctggaattctggggccagggaacagccgtgacagtgtctagtgcatctgtggccgctcctagcgtgttcatcttcccacctagcgacgaggaactgaagtctggcacagccagcgtcgtgtgcctgctgaacaacttctaccccagagaagccaaggtgcagtggaaggtggacaacgccctgcagagcggcaatagccaagagagcgtgaccgagcaggacagcaaggactctacctacagcctgagcagcaccctgacactgagcaaggccgactacgagaagcacaaagtgtacgcctgcgaagtgacccaccagggcctttctagccctgtgaccaagagcttcaaccggggcgagtgcgataagacccacacctgtcctccatgtccagctccagaactgctgggcggaccttccgtgttcctgtttcctccaaagcctaaggacaccctgatgatcagcagaacccctgaagtgacctgcgtggtggtggatgtgtctcacgaggaccctgaagtgaagttcaattggtacgtggacggcgtggaagtgcacaacgccaagaccaagcctagagaggaacagtacaacagcacctacagagtggtgtccgtgctgaccgtgctgcaccaggattggctgaacggcaaagagtacaagtgcaaggtgtccaacaaggccctgcctgcccctgaggaaaagaccatcagcaaggccaagggccagcctagggaaccccaggtttacacactgcctccaagccgcgaggaaatgaccaagaaccaggtgtccctgacctgcctcgtgaagggcttctacccttccgatatcgccgtggaatgggagagcaatggccagcctgagaacaactacaagacaacccctcctgtgctggacagcgacggctcattcttcctgtacagcaagctgaccgtggacaagtccagatggcagcagggcaacgtgttcagctgtagcgtgctgcacgaagccctgcacagccactacacccagaaaagcctgtctctgagccccggcaaatgataaggatccgatctggtactgcatgcacgcaatgctagctgcccctttcccgtcctgggtaccccgagtctcccccgacctcgggtcccaggtatgctcccacctccacctgccccactcaccacctctgctagttccagacacctcccaagcacgcagcaatgcagctcaaaacgcttagcctagccacacccccacgggaaacagcagtgattaacctttagcaataaacgaaagtttaactaagctatactaaccccagggttggtcaatttcgtgccagccacaccctcgagctagcaaaaaaaaaaaaaaaaaaaaaaaaaaaaaagcatatgactaaaaaaaaaaaaaaaaaaaaaaaaaaaaaaaaaaaaaaaaaaaaaaaaaaaaaaaaaaaaaaaaaaaaaa

SEQ ID NO: 905 - RNA, 1949 nt, synthetic construct
  source 1..1949: mol_type = other RNA
agaataaactagtattcttctggtccccacagactcagagagaacccgccaccatggattggatctggcgcatcctgtttctcgtgggagctgccacaggcgcccactctcaagttcacctgacacagtctggccccgaagtgcggaagcctggcacaagcgtgaaggtgtcctgtaaagcccctggcaacaccctgaaaacctacgacctgcactgggtccgatctgtgcctggacaaggactgcagtggatgggctggattagccacgagggcgacaagaaagtgatcgtggaacggttcaaggccaaagtgaccatcgactgggacagaagcaccaacaccgcctacctgcagctgagcggactgacatctggcgataccgccgtgtactactgtgccaagggcagcaagcaccggctgagagattacgccctgtacgacgatgacggcgccctgaattgggccgtcgatgtggactacctgagcaacctggaattctggggccagggaacagccgtgacagtgtctagtgcatctgtggccgctcctagcgtgttcatcttcccacctagcgacgaggaactgaagtctggcacagccagcgtcgtgtgcctgctgaacaacttctaccccagagaagccaaggtgcagtggaaggtggacaacgccctgcagagcggcaatagccaagagagcgtgaccgagcaggacagcaaggactctacctacagcctgagcagcaccctgacactgagcaaggccgactacgagaagcacaaagtgtacgcctgcgaagtgacccaccagggcctttctagccctgtgaccaagagcttcaaccggggcgagtgcgataagacccacacctgtcctccatgtccagctccagaactgctcggcggaccttccgtgttcctgtttcctccaaagcctaaggacaccctgatgatcagcagaacccctgaagtgacctgcgtggtggtggatgtgtctcacgaggaccccgaagtgaagttcaattggtacgtggacggcgtggaagtgcacaacgccaagaccaagcctagagaggaacagtacaacagcacctacagagtggtgtccgtgctgacagtgctgcaccaggattggctgaacggcaaagagtacaagtgcaaggtgtccaacaaggccctgcctgctcctatcgagaaaaccatcagcaaggccaagggccagcctagggaaccccaagtctgtacactgcctcctagccgcgaggaaatgaccaagaaccaggtgtccctgagctgcgccgtgaagggcttttacccttccgatatcgccgtggaatgggagagcaatggccagcctgagaacaactacaagacaacccctcctgtgctggacagcgacggctcattcttcctggtgtccaagctgacagtggacaagagcagatggcagcagggcaacgtgttcagctgctctgtgctgcacgaagccctgcacagccactacacccagaagtccctgtctctgagccccggcaagtgataaggatccgatctggtactgcatgcacgcaatgctagctgcccctttcccgtcctgggtaccccgagtctcccccgacctcgggtcccaggtatgctcccacctccacctgccccactcaccacctctgctagttccagacacctcccaagcacgcagcaatgcagctcaaaacgcttagcctagccacacccccacgggaaacagcagtgattaacctttagcaataaacgaaagtttaactaagctatactaaccccagggttggtcaatttcgtgccagccacaccctcgagctagcaaaaaaaaaaaaaaaaaaaaaaaaaaaaaagcatatgactaaaaaaaaaaaaaaaaaaaaaaaaaaaaaaaaaaaaaaaaaaaaaaaaaaaaaaaaaaaaaaaaaaaaaa

SEQ ID NO: 906 - RNA, 1949 nt, synthetic construct
  source 1..1949: mol_type = other RNA
agaataaactagtattcttctggtccccacagactcagagagaacccgccaccatggattggatctggcgcatcctgtttctcgtgggagctgccacaggcgcccactctcaagttcacctgacacagtctggccccgaagtgcggaagcctggcacaagcgtgaaggtgtcctgtaaagcccctggcaacaccctgaaaacctacgacctgcactgggtccgatctgtgcctggacaaggactgcagtggatgggctggattagccacgagggcgacaagaaagtgatcgtggaacggttcaaggccaaagtgaccatcgactgggacagaagcaccaacaccgcctacctgcagctgagcggactgacatctggcgataccgccgtgtactactgtgccaagggcagcaagcaccggctgagagattacgccctgtacgacgatgacggcgccctgaattgggccgtcgatgtggactacctgagcaacctggaattctggggccagggaacagccgtgacagtgtctagtgcatctgtggccgctcctagcgtgttcatcttcccacctagcgacgaggaactgaagtctggcacagccagcgtcgtgtgcctgctgaacaacttctaccccagagaagccaaggtgcagtggaaggtggacaacgccctgcagagcggcaatagccaagagagcgtgaccgagcaggacagcaaggactctacctacagcctgagcagcaccctgacactgagcaaggccgactacgagaagcacaaagtgtacgcctgcgaagtgacccaccagggcctttctagccctgtgaccaagagcttcaaccggggcgagtgcgataagacccacacctgtcctccatgtccagctccagaactgctggccggaccttccgtgttcctgtttcctccaaagcctaaggacaccctgatgatcagcagaacccctgaagtgacctgcgtggtggtggatgtgtctcacgaggaccccgaagtgaagttcaattggtacgtggacggcgtggaagtgcacaatgccaagaccaagcctagagaggaacagtacaacagcacctacagagtggtgtccgtgctgaccgtgctgcaccaggattggctgaacggcaaagagtacaagtgcaaggtgtccaacaaggccctgcctctgcctgaggaaaagaccatcagcaaggccaagggccagcctagggaaccccaagtctgtacactgcctcctagccgcgaggaaatgaccaagaaccaggtgtccctgagctgcgccgtgaagggcttttacccttccgatatcgccgtggaatgggagagcaatggccagcctgagaacaactacaagacaacccctcctgtgctggacagcgacggctcattcttcctggtgtccaagctgacagtggacaagagcagatggcagcagggcaacgtgttcagctgctctgtgctgcacgaagccctgcacagccactacacccagaagtccctgtctctgagccccggcaagtgataaggatccgatctggtactgcatgcacgcaatgctagctgcccctttcccgtcctgggtaccccgagtctcccccgacctcgggtcccaggtatgctcccacctccacctgccccactcaccacctctgctagttccagacacctcccaagcacgcagcaatgcagctcaaaacgcttagcctagccacacccccacgggaaacagcagtgattaacctttagcaataaacgaaagtttaactaagctatactaaccccagggttggtcaatttcgtgccagccacaccctcgagctagcaaaaaaaaaaaaaaaaaaaaaaaaaaaaaagcatatgactaaaaaaaaaaaaaaaaaaaaaaaaaaaaaaaaaaaaaaaaaaaaaaaaaaaaaaaaaaaaaaaaaaaaaa

SEQ ID NO: 907 - RNA, 1949 nt, synthetic construct
  source 1..1949: mol_type = other RNA
agaataaactagtattcttctggtccccacagactcagagagaacccgccaccatggattggatctggcgcatcctgtttctcgtgggagctgccacaggcgcccactctcaagttcacctgacacagtctggccccgaagtgcggaagcctggcacaagcgtgaaggtgtcctgtaaagcccctggcaacaccctgaaaacctacgacctgcactgggtccgatctgtgcctggacaaggactgcagtggatgggctggattagccacgagggcgacaagaaagtgatcgtggaacggttcaaggccaaagtgaccatcgactgggacagaagcaccaacaccgcctacctgcagctgagcggactgacatctggcgataccgccgtgtactactgtgccaagggcagcaagcaccggctgagagattacgccctgtacgacgatgacggcgccctgaattgggccgtcgatgtggactacctgagcaacctggaattctggggccagggaacagccgtgacagtgtctagtgcatctgtggccgctcctagcgtgttcatcttcccacctagcgacgaggaactgaagtctggcacagccagcgtcgtgtgcctgctgaacaacttctaccccagagaagccaaggtgcagtggaaggtggacaacgccctgcagagcggcaatagccaagagagcgtgaccgagcaggacagcaaggactctacctacagcctgagcagcaccctgacactgagcaaggccgactacgagaagcacaaagtgtacgcctgcgaagtgacccaccagggcctttctagccctgtgaccaagagcttcaaccggggcgagtgcgataagacccacacctgtcctccatgtccagctccagaactgctggccggaccttccgtgttcctgtttcctccaaagcctaaggacaccctgatgatcagcagaacccctgaagtgacctgcgtggtggtggatgtgtctcacgaggaccctgaagtgaagttcaattggtacgtggacggcgtggaagtgcacaacgccaagaccaagcctagagaggaacagtacaacagcacctacagagtggtgtccgtgctgaccgtgctgcaccaggattggctgaacggcaaagagtacaagtgcaaggtgtccaacaaggccctgcctgcccctgaggaaaagaccatcagcaaggccaagggccagcctagggaaccccaagtctgtacactgcctcctagccgcgaggaaatgaccaagaaccaggtgtccctgagctgcgccgtgaagggcttttacccttccgatatcgccgtggaatgggagagcaatggccagcctgagaacaactacaagacaacccctcctgtgctggacagcgacggctcattcttcctggtgtccaagctgacagtggacaagagcagatggcagcagggcaacgtgttcagctgctctgtgctgcacgaagccctgcacagccactacacccagaagtccctgtctctgagccccggcaagtgataaggatccgatctggtactgcatgcacgcaatgctagctgcccctttcccgtcctgggtaccccgagtctcccccgacctcgggtcccaggtatgctcccacctccacctgccccactcaccacctctgctagttccagacacctcccaagcacgcagcaatgcagctcaaaacgcttagcctagccacacccccacgggaaacagcagtgattaacctttagcaataaacgaaagtttaactaagctatactaaccccagggttggtcaatttcgtgccagccacaccctcgagctagcaaaaaaaaaaaaaaaaaaaaaaaaaaaaaagcatatgactaaaaaaaaaaaaaaaaaaaaaaaaaaaaaaaaaaaaaaaaaaaaaaaaaaaaaaaaaaaaaaaaaaaaaa

SEQ ID NO: 908 - RNA, 1949 nt, synthetic construct
  source 1..1949: mol_type = other RNA
agaataaactagtattcttctggtccccacagactcagagagaacccgccaccatggattggatctggcgcatcctgtttctcgtgggagctgccacaggcgcccactctcaagttcacctgacacagtctggccccgaagtgcggaagcctggcacaagcgtgaaggtgtcctgtaaagcccctggcaacaccctgaaaacctacgacctgcactgggtccgatctgtgcctggacaaggactgcagtggatgggctggattagccacgagggcgacaagaaagtgatcgtggaacggttcaaggccaaagtgaccatcgactgggacagaagcaccaacaccgcctacctgcagctgagcggactgacatctggcgataccgccgtgtactactgtgccaagggcagcaagcaccggctgagagattacgccctgtacgacgatgacggcgccctgaattgggccgtcgatgtggactacctgagcaacctggaattctggggccagggaacagccgtgacagtgtctagtgcatctgtggccgctcctagcgtgttcatcttcccacctagcgacgaggaactgaagtctggcacagccagcgtcgtgtgcctgctgaacaacttctaccccagagaagccaaggtgcagtggaaggtggacaacgccctgcagagcggcaatagccaagagagcgtgaccgagcaggacagcaaggactctacctacagcctgagcagcaccctgacactgagcaaggccgactacgagaagcacaaagtgtacgcctgcgaagtgacccaccagggcctttctagccctgtgaccaagagcttcaaccggggcgagtgcgataagacccacacctgtcctccatgtccagctccagaactgctggccggaccttccgtgttcctgtttcctccaaagcctaaggacaccctgatgatcagcagaacccctgaagtgacctgcgtggtggtggatgtgtctcacgaggaccctgaagtgaagttcaattggtacgtggacggcgtggaagtgcacaacgccaagaccaagcctagagaggaacagtacaacagcacctacagagtggtgtccgtgctgaccgtgctgcaccaggattggctgaacggcaaagagtacaagtgcaaggtgtccaacaaggccctgcctgcccctatcgaaaagaccatcagcaaggccaagggccagcctagggaaccccaagtctgtacactgcctcctagccgcgaggaaatgaccaagaaccaggtgtccctgagctgcgccgtgaagggcttttacccttccgatatcgccgtggaatgggagagcaatggccagcctgagaacaactacaagacaacccctcctgtgctggacagcgacggctcattcttcctggtgtccaagctgacagtggacaagagcagatggcagcagggcaacgtgttcagctgctctgtgctgcacgaagccctgcacagccactacacccagaagtccctgtctctgagccccggcaagtgataaggatccgatctggtactgcatgcacgcaatgctagctgcccctttcccgtcctgggtaccccgagtctcccccgacctcgggtcccaggtatgctcccacctccacctgccccactcaccacctctgctagttccagacacctcccaagcacgcagcaatgcagctcaaaacgcttagcctagccacacccccacgggaaacagcagtgattaacctttagcaataaacgaaagtttaactaagctatactaaccccagggttggtcaatttcgtgccagccacaccctcgagctagcaaaaaaaaaaaaaaaaaaaaaaaaaaaaaagcatatgactaaaaaaaaaaaaaaaaaaaaaaaaaaaaaaaaaaaaaaaaaaaaaaaaaaaaaaaaaaaaaaaaaaaaaa

SEQ ID NO: 909 - RNA, 1949 nt, synthetic construct
  source 1..1949: mol_type = other RNA
agaataaactagtattcttctggtccccacagactcagagagaacccgccaccatggattggatctggcgcatcctgtttctcgtgggagctgccacaggcgcccactctcaagttcacctgacacagtctggccccgaagtgcggaagcctggcacaagcgtgaaggtgtcctgtaaagcccctggcaacaccctgaaaacctacgacctgcactgggtccgatctgtgcctggacaaggactgcagtggatgggctggattagccacgagggcgacaagaaagtgatcgtggaacggttcaaggccaaagtgaccatcgactgggacagaagcaccaacaccgcctacctgcagctgagcggactgacatctggcgataccgccgtgtactactgtgccaagggcagcaagcaccggctgagagattacgccctgtacgacgatgacggcgccctgaattgggccgtcgatgtggactacctgagcaacctggaattctggggccagggaacagccgtgacagtgtctagtgcatctgtggccgctcctagcgtgttcatcttcccacctagcgacgaggaactgaagtctggcacagccagcgtcgtgtgcctgctgaacaacttctaccccagagaagccaaggtgcagtggaaggtggacaacgccctgcagagcggcaatagccaagagagcgtgaccgagcaggacagcaaggactctacctacagcctgagcagcaccctgacactgagcaaggccgactacgagaagcacaaagtgtacgcctgcgaagtgacccaccagggcctttctagccctgtgaccaagagcttcaaccggggcgagtgcgataagacccacacctgtcctccatgtccagctccagaactgctgggcggaccttccgtgttcctgtttcctccaaagcctaaggacaccctgatgatcagcagaacccctgaagtgacctgcgtggtggtggatgtgtctcacgaggaccctgaagtgaagttcaattggtacgtggacggcgtggaagtgcacaacgccaagaccaagcctagagaggaacagtacaacagcacctacagagtggtgtccgtgctgaccgtgctgcaccaggattggctgaacggcaaagagtacaagtgcaaggtgtccaacaaggccctgcctgcccctgaggaaaagaccatcagcaaggccaagggccagcctagggaaccccaagtctgtacactgcctcctagccgcgaggaaatgaccaagaaccaggtgtccctgagctgcgccgtgaagggcttttacccttccgatatcgccgtggaatgggagagcaatggccagcctgagaacaactacaagacaacccctcctgtgctggacagcgacggctcattcttcctggtgtccaagctgacagtggacaagagcagatggcagcagggcaacgtgttcagctgctctgtgctgcacgaagccctgcacagccactacacccagaagtccctgtctctgagccccggcaagtgataaggatccgatctggtactgcatgcacgcaatgctagctgcccctttcccgtcctgggtaccccgagtctcccccgacctcgggtcccaggtatgctcccacctccacctgccccactcaccacctctgctagttccagacacctcccaagcacgcagcaatgcagctcaaaacgcttagcctagccacacccccacgggaaacagcagtgattaacctttagcaataaacgaaagtttaactaagctatactaaccccagggttggtcaatttcgtgccagccacaccctcgagctagcaaaaaaaaaaaaaaaaaaaaaaaaaaaaaagcatatgactaaaaaaaaaaaaaaaaaaaaaaaaaaaaaaaaaaaaaaaaaaaaaaaaaaaaaaaaaaaaaaaaaaaaaa

SEQ ID NO: 910 - RNA, 1949 nt, synthetic construct
  source 1..1949: mol_type = other RNA
agaataaactagtattcttctggtccccacagactcagagagaacccgccaccatggattggatctggcgcatcctgtttctcgtgggagctgccacaggcgcccactctcaagttcacctgacacagtctggccccgaagtgcggaagcctggcacaagcgtgaaggtgtcctgtaaagcccctggcaacaccctgaaaacctacgacctgcactgggtccgatctgtgcctggacaaggactgcagtggatgggctggattagccacgagggcgacaagaaagtgatcgtggaacggttcaaggccaaagtgaccatcgactgggacagaagcaccaacaccgcctacctgcagctgagcggactgacatctggcgataccgccgtgtactactgtgccaagggcagcaagcaccggctgagagattacgccctgtacgacgatgacggcgccctgaattgggccgtcgatgtggactacctgagcaacctggaattctggggccagggaacagccgtgacagtgtctagtgcatctgtggccgctcctagcgtgttcatcttcccacctagcgacgaggaactgaagtctggcacagccagcgtcgtgtgcctgctgaacaacttctaccccagagaagccaaggtgcagtggaaggtggacaacgccctgcagagcggcaatagccaagagagcgtgaccgagcaggacagcaaggactctacctacagcctgagcagcaccctgacactgagcaaggccgactacgagaagcacaaagtgtacgcctgcgaagtgacccaccagggcctttctagccctgtgaccaagagcttcaaccggggcgagtgcgataagacccacacctgtcctccatgtccagctccagaactgctcggcggaccttccgtgttcctgtttcctccaaagcctaaggacaccctgatgatcagcagaacccctgaagtgacctgcgtggtggtggatgtgtctcacgaggaccccgaagtgaagttcaattggtacgtggacggcgtggaagtgcacaacgccaagaccaagcctagagaggaacagtacaacagcacctacagagtggtgtccgtgctgacagtgctgcaccaggattggctgaacggcaaagagtacaagtgcaaggtgtccaacaaggccctgcctgctcctatcgagaaaaccatcagcaaggccaagggccagcctagggaaccccaggtttacaccctgcctccatgccgcgaggaaatgaccaagaaccaggtgtccctgtggtgcctcgtgaagggcttctacccttccgatatcgccgtggaatgggagagcaatggccagcctgagaacaactacaagacaacccctcctgtgctggacagcgacggctcattcttcctgtacagcaagctgaccgtggacaagtccagatggcagcagggcaacgtgttcagctgtagcgtgctgcacgaagccctgcacagccactacacccagaagtccctgtctctgagccccggcaagtgataaggatccgatctggtactgcatgcacgcaatgctagctgcccctttcccgtcctgggtaccccgagtctcccccgacctcgggtcccaggtatgctcccacctccacctgccccactcaccacctctgctagttccagacacctcccaagcacgcagcaatgcagctcaaaacgcttagcctagccacacccccacgggaaacagcagtgattaacctttagcaataaacgaaagtttaactaagctatactaaccccagggttggtcaatttcgtgccagccacaccctcgagctagcaaaaaaaaaaaaaaaaaaaaaaaaaaaaaagcatatgactaaaaaaaaaaaaaaaaaaaaaaaaaaaaaaaaaaaaaaaaaaaaaaaaaaaaaaaaaaaaaaaaaaaaaa

SEQ ID NO: 911 - RNA, 1949 nt, synthetic construct
  source 1..1949: mol_type = other RNA
agaataaactagtattcttctggtccccacagactcagagagaacccgccaccatggattggatctggcgcatcctgtttctcgtgggagctgccacaggcgcccactctcaagttcacctgacacagtctggccccgaagtgcggaagcctggcacaagcgtgaaggtgtcctgtaaagcccctggcaacaccctgaaaacctacgacctgcactgggtccgatctgtgcctggacaaggactgcagtggatgggctggattagccacgagggcgacaagaaagtgatcgtggaacggttcaaggccaaagtgaccatcgactgggacagaagcaccaacaccgcctacctgcagctgagcggactgacatctggcgataccgccgtgtactactgtgccaagggcagcaagcaccggctgagagattacgccctgtacgacgatgacggcgccctgaattgggccgtcgatgtggactacctgagcaacctggaattctggggccagggaacagccgtgacagtgtctagtgcatctgtggccgctcctagcgtgttcatcttcccacctagcgacgaggaactgaagtctggcacagccagcgtcgtgtgcctgctgaacaacttctaccccagagaagccaaggtgcagtggaaggtggacaacgccctgcagagcggcaatagccaagagagcgtgaccgagcaggacagcaaggactctacctacagcctgagcagcaccctgacactgagcaaggccgactacgagaagcacaaagtgtacgcctgcgaagtgacccaccagggcctttctagccctgtgaccaagagcttcaaccggggcgagtgcgataagacccacacctgtcctccatgtccagctccagaactgctggccggaccttccgtgttcctgtttcctccaaagcctaaggacaccctgatgatcagcagaacccctgaagtgacctgcgtggtggtggatgtgtctcacgaggaccccgaagtgaagttcaattggtacgtggacggcgtggaagtgcacaatgccaagaccaagcctagagaggaacagtacaacagcacctacagagtggtgtccgtgctgaccgtgctgcaccaggattggctgaacggcaaagagtacaagtgcaaggtgtccaacaaggccctgcctctgcctgaggaaaagaccatcagcaaggccaagggccagcctagggaaccccaggtttacaccctgcctccatgccgcgaggaaatgaccaagaaccaggtgtccctgtggtgcctcgtgaagggcttctacccttccgatatcgccgtggaatgggagagcaatggccagcctgagaacaactacaagacaacccctcctgtgctggacagcgacggctcattcttcctgtacagcaagctgaccgtggacaagtccagatggcagcagggcaacgtgttcagctgtagcgtgctgcacgaagccctgcacagccactacacccagaagtccctgtctctgagccccggcaagtgataaggatccgatctggtactgcatgcacgcaatgctagctgcccctttcccgtcctgggtaccccgagtctcccccgacctcgggtcccaggtatgctcccacctccacctgccccactcaccacctctgctagttccagacacctcccaagcacgcagcaatgcagctcaaaacgcttagcctagccacacccccacgggaaacagcagtgattaacctttagcaataaacgaaagtttaactaagctatactaaccccagggttggtcaatttcgtgccagccacaccctcgagctagcaaaaaaaaaaaaaaaaaaaaaaaaaaaaaagcatatgactaaaaaaaaaaaaaaaaaaaaaaaaaaaaaaaaaaaaaaaaaaaaaaaaaaaaaaaaaaaaaaaaaaaaaa

SEQ ID NO: 912 - RNA, 1949 nt, synthetic construct
  source 1..1949: mol_type = other RNA
agaataaactagtattcttctggtccccacagactcagagagaacccgccaccatggattggatctggcgcatcctgtttctcgtgggagctgccacaggcgcccactctcaagttcacctgacacagtctggccccgaagtgcggaagcctggcacaagcgtgaaggtgtcctgtaaagcccctggcaacaccctgaaaacctacgacctgcactgggtccgatctgtgcctggacaaggactgcagtggatgggctggattagccacgagggcgacaagaaagtgatcgtggaacggttcaaggccaaagtgaccatcgactgggacagaagcaccaacaccgcctacctgcagctgagcggactgacatctggcgataccgccgtgtactactgtgccaagggcagcaagcaccggctgagagattacgccctgtacgacgatgacggcgccctgaattgggccgtcgatgtggactacctgagcaacctggaattctggggccagggaacagccgtgacagtgtctagtgcatctgtggccgctcctagcgtgttcatcttcccacctagcgacgaggaactgaagtctggcacagccagcgtcgtgtgcctgctgaacaacttctaccccagagaagccaaggtgcagtggaaggtggacaacgccctgcagagcggcaatagccaagagagcgtgaccgagcaggacagcaaggactctacctacagcctgagcagcaccctgacactgagcaaggccgactacgagaagcacaaagtgtacgcctgcgaagtgacccaccagggcctttctagccctgtgaccaagagcttcaaccggggcgagtgcgataagacccacacctgtcctccatgtccagctccagaactgctggccggaccttccgtgttcctgtttcctccaaagcctaaggacaccctgatgatcagcagaacccctgaagtgacctgcgtggtggtggatgtgtctcacgaggaccctgaagtgaagttcaattggtacgtggacggcgtggaagtgcacaacgccaagaccaagcctagagaggaacagtacaacagcacctacagagtggtgtccgtgctgaccgtgctgcaccaggattggctgaacggcaaagagtacaagtgcaaggtgtccaacaaggccctgcctgcccctgaggaaaagaccatcagcaaggccaagggccagcctagggaaccccaggtttacaccctgcctccatgccgcgaggaaatgaccaagaaccaggtgtccctgtggtgcctcgtgaagggcttctacccttccgatatcgccgtggaatgggagagcaatggccagcctgagaacaactacaagacaacccctcctgtgctggacagcgacggctcattcttcctgtacagcaagctgaccgtggacaagtccagatggcagcagggcaacgtgttcagctgtagcgtgctgcacgaagccctgcacagccactacacccagaagtccctgtctctgagccccggcaagtgataaggatccgatctggtactgcatgcacgcaatgctagctgcccctttcccgtcctgggtaccccgagtctcccccgacctcgggtcccaggtatgctcccacctccacctgccccactcaccacctctgctagttccagacacctcccaagcacgcagcaatgcagctcaaaacgcttagcctagccacacccccacgggaaacagcagtgattaacctttagcaataaacgaaagtttaactaagctatactaaccccagggttggtcaatttcgtgccagccacaccctcgagctagcaaaaaaaaaaaaaaaaaaaaaaaaaaaaaagcatatgactaaaaaaaaaaaaaaaaaaaaaaaaaaaaaaaaaaaaaaaaaaaaaaaaaaaaaaaaaaaaaaaaaaaaaa

SEQ ID NO: 913 - RNA, 1949 nt, synthetic construct
  source 1..1949: mol_type = other RNA
agaataaactagtattcttctggtccccacagactcagagagaacccgccaccatggattggatctggcgcatcctgtttctcgtgggagctgccacaggcgcccactctcaagttcacctgacacagtctggccccgaagtgcggaagcctggcacaagcgtgaaggtgtcctgtaaagcccctggcaacaccctgaaaacctacgacctgcactgggtccgatctgtgcctggacaaggactgcagtggatgggctggattagccacgagggcgacaagaaagtgatcgtggaacggttcaaggccaaagtgaccatcgactgggacagaagcaccaacaccgcctacctgcagctgagcggactgacatctggcgataccgccgtgtactactgtgccaagggcagcaagcaccggctgagagattacgccctgtacgacgatgacggcgccctgaattgggccgtcgatgtggactacctgagcaacctggaattctggggccagggaacagccgtgacagtgtctagtgcatctgtggccgctcctagcgtgttcatcttcccacctagcgacgaggaactgaagtctggcacagccagcgtcgtgtgcctgctgaacaacttctaccccagagaagccaaggtgcagtggaaggtggacaacgccctgcagagcggcaatagccaagagagcgtgaccgagcaggacagcaaggactctacctacagcctgagcagcaccctgacactgagcaaggccgactacgagaagcacaaagtgtacgcctgcgaagtgacccaccagggcctttctagccctgtgaccaagagcttcaaccggggcgagtgcgataagacccacacctgtcctccatgtccagctccagaactgctggccggaccttccgtgttcctgtttcctccaaagcctaaggacaccctgatgatcagcagaacccctgaagtgacctgcgtggtggtggatgtgtctcacgaggaccctgaagtgaagttcaattggtacgtggacggcgtggaagtgcacaacgccaagaccaagcctagagaggaacagtacaacagcacctacagagtggtgtccgtgctgaccgtgctgcaccaggattggctgaacggcaaagagtacaagtgcaaggtgtccaacaaggccctgcctgcccctatcgaaaagaccatcagcaaggccaagggccagcctagggaaccccaggtttacaccctgcctccatgccgcgaggaaatgaccaagaaccaggtgtccctgtggtgcctcgtgaagggcttctacccttccgatatcgccgtggaatgggagagcaatggccagcctgagaacaactacaagacaacccctcctgtgctggacagcgacggctcattcttcctgtacagcaagctgaccgtggacaagtccagatggcagcagggcaacgtgttcagctgtagcgtgctgcacgaagccctgcacagccactacacccagaagtccctgtctctgagccccggcaagtgataaggatccgatctggtactgcatgcacgcaatgctagctgcccctttcccgtcctgggtaccccgagtctcccccgacctcgggtcccaggtatgctcccacctccacctgccccactcaccacctctgctagttccagacacctcccaagcacgcagcaatgcagctcaaaacgcttagcctagccacacccccacgggaaacagcagtgattaacctttagcaataaacgaaagtttaactaagctatactaaccccagggttggtcaatttcgtgccagccacaccctcgagctagcaaaaaaaaaaaaaaaaaaaaaaaaaaaaaagcatatgactaaaaaaaaaaaaaaaaaaaaaaaaaaaaaaaaaaaaaaaaaaaaaaaaaaaaaaaaaaaaaaaaaaaaaa

SEQ ID NO: 914 - RNA, 1949 nt, synthetic construct
  source 1..1949: mol_type = other RNA
agaataaactagtattcttctggtccccacagactcagagagaacccgccaccatggattggatctggcgcatcctgtttctcgtgggagctgccacaggcgcccactctcaagttcacctgacacagtctggccccgaagtgcggaagcctggcacaagcgtgaaggtgtcctgtaaagcccctggcaacaccctgaaaacctacgacctgcactgggtccgatctgtgcctggacaaggactgcagtggatgggctggattagccacgagggcgacaagaaagtgatcgtggaacggttcaaggccaaagtgaccatcgactgggacagaagcaccaacaccgcctacctgcagctgagcggactgacatctggcgataccgccgtgtactactgtgccaagggcagcaagcaccggctgagagattacgccctgtacgacgatgacggcgccctgaattgggccgtcgatgtggactacctgagcaacctggaattctggggccagggaacagccgtgacagtgtctagtgcatctgtggccgctcctagcgtgttcatcttcccacctagcgacgaggaactgaagtctggcacagccagcgtcgtgtgcctgctgaacaacttctaccccagagaagccaaggtgcagtggaaggtggacaacgccctgcagagcggcaatagccaagagagcgtgaccgagcaggacagcaaggactctacctacagcctgagcagcaccctgacactgagcaaggccgactacgagaagcacaaagtgtacgcctgcgaagtgacccaccagggcctttctagccctgtgaccaagagcttcaaccggggcgagtgcgataagacccacacctgtcctccatgtccagctccagaactgctgggcggaccttccgtgttcctgtttcctccaaagcctaaggacaccctgatgatcagcagaacccctgaagtgacctgcgtggtggtggatgtgtctcacgaggaccctgaagtgaagttcaattggtacgtggacggcgtggaagtgcacaacgccaagaccaagcctagagaggaacagtacaacagcacctacagagtggtgtccgtgctgaccgtgctgcaccaggattggctgaacggcaaagagtacaagtgcaaggtgtccaacaaggccctgcctgcccctgaggaaaagaccatcagcaaggccaagggccagcctagggaaccccaggtttacaccctgcctccatgccgcgaggaaatgaccaagaaccaggtgtccctgtggtgcctcgtgaagggcttctacccttccgatatcgccgtggaatgggagagcaatggccagcctgagaacaactacaagacaacccctcctgtgctggacagcgacggctcattcttcctgtacagcaagctgaccgtggacaagtccagatggcagcagggcaacgtgttcagctgtagcgtgctgcacgaagccctgcacagccactacacccagaagtccctgtctctgagccccggcaagtgataaggatccgatctggtactgcatgcacgcaatgctagctgcccctttcccgtcctgggtaccccgagtctcccccgacctcgggtcccaggtatgctcccacctccacctgccccactcaccacctctgctagttccagacacctcccaagcacgcagcaatgcagctcaaaacgcttagcctagccacacccccacgggaaacagcagtgattaacctttagcaataaacgaaagtttaactaagctatactaaccccagggttggtcaatttcgtgccagccacaccctcgagctagcaaaaaaaaaaaaaaaaaaaaaaaaaaaaaagcatatgactaaaaaaaaaaaaaaaaaaaaaaaaaaaaaaaaaaaaaaaaaaaaaaaaaaaaaaaaaaaaaaaaaaaaaa

SEQ ID NO: 915 - RNA, 1949 nt, synthetic construct; identical to SEQ ID NO: 899
  source 1..1949: mol_type = other RNA

SEQ ID NO: 916 - RNA, 1949 nt, synthetic construct; identical to SEQ ID NO: 900
  source 1..1949: mol_type = other RNA

SEQ ID NO: 917 - RNA, 1949 nt, synthetic construct; identical to SEQ ID NO: 901
  source 1..1949: mol_type = other RNA

SEQ ID NO: 918 - RNA, 1949 nt, synthetic construct; identical to SEQ ID NO: 902
  source 1..1949: mol_type = other RNA

SEQ ID NO: 919 - RNA, 1949 nt, synthetic construct; identical to SEQ ID NO: 903
  source 1..1949: mol_type = other RNA

SEQ ID NO: 920 - RNA, 1949 nt, synthetic construct; identical to SEQ ID NO: 904
  source 1..1949: mol_type = other RNA

SEQ ID NO: 921 - RNA, 1949 nt, synthetic construct; identical to SEQ ID NO: 905
  source 1..1949: mol_type = other RNA

SEQ ID NO: 922 - RNA, 1949 nt, synthetic construct; identical to SEQ ID NO: 906
  source 1..1949: mol_type = other RNA

SEQ ID NO: 923 - RNA, 1949 nt, synthetic construct; identical to SEQ ID NO: 907
  source 1..1949: mol_type = other RNA

SEQ ID NO: 924 - RNA, 1949 nt, synthetic construct; identical to SEQ ID NO: 908
  source 1..1949: mol_type = other RNA

SEQ ID NO: 925 - RNA, 1949 nt, synthetic construct; identical to SEQ ID NO: 909
  source 1..1949: mol_type = other RNA

SEQ ID NO: 926 - RNA, 1949 nt, synthetic construct; identical to SEQ ID NO: 910
  source 1..1949: mol_type = other RNA

SEQ ID NO: 927 - RNA, 1949 nt, synthetic construct; identical to SEQ ID NO: 911
  source 1..1949: mol_type = other RNA

SEQ ID NO: 928 - RNA, 1949 nt, synthetic construct; identical to SEQ ID NO: 912
  source 1..1949: mol_type = other RNA

SEQ ID NO: 929 - RNA, 1949 nt, synthetic construct; identical to SEQ ID NO: 913
  source 1..1949: mol_type = other RNA

SEQ ID NO: 930 - RNA, 1949 nt, synthetic construct; identical to SEQ ID NO: 914
  source 1..1949: mol_type = other RNA

SEQ ID NO: 931 - RNA, 1949 nt, synthetic construct
  source 1..1949: mol_type = other RNA
agaataaactagtattcttctggtccccacagactcagagagaacccgccaccatggattggatctggcgcatcctgtttctcgtgggagctgccacaggcgcccactctcaagttcacctgacacagtctggccccgaagtgcggaagcctggcacaagcgtgaaggtgtcctgtaaagcccctggcaacaccctgaaaacctacgacctgcactgggtccgatctgtgcctggacaaggactgcagtggatgggctggattagccacgagggcgacaagaaagtgatcgtggaacggttcaaggccaaagtgaccatcgactgggacagaagcaccaacaccgcctacctgcagctgagcggactgacatctggcgataccgccgtgtactactgtgccaagggcagcaagcaccggctgagagattacgccctgtacgacgatgacggcgccctgaattgggccgtcgatgtggactacctgagcaacctggaattctggggccagggaacagccgtgacagtgtctagtgcatctgtggccgctcctagcgtgttcatcttcccacctagcgacgaggaactgaagtctggcacagccagcgtcgtgtgcctgctgaacaacttctaccccagagaagccaaggtgcagtggaaggtggacaacgccctgcagagcggcaatagccaagagagcgtgaccgagcaggacagcaaggactctacctacagcctgagcagcaccctgacactgagcaaggccgactacgagaagcacaaagtgtacgcctgcgaagtgacccaccagggcctttctagccctgtgaccaagagcttcaaccggggcgagtgcgataagacccacacctgtcctccatgtccagctccagaactgctcggcggaccttccgtgttcctgtttcctccaaagcctaaggacaccctgatgatcagcagaacccctgaagtgacctgcgtggtggtggatgtgtctcacgaggaccccgaagtgaagttcaattggtacgtggacggcgtggaagtgcacaacgccaagaccaagcctagagaggaacagtacaacagcacctacagagtggtgtccgtgctgacagtgctgcaccaggattggctgaacggcaaagagtacaagtgcaaggtgtccaacaaggccctgcctgctcctatcgagaaaaccatcagcaaggccaagggccagcctagggaaccccaggtttacacactgcctccaagccgcgacgaactgaccaagaaccaggtgtccctgacctgcctcgtgaagggcttctacccttccgatatcgccgtggaatgggagagcaatggccagcctgagaacaactacaagacaacccctcctgtgctggacagcgacggctcattcttcctgtacagcaagctgactgtggataagtcccggtggcagcagggcaacgtgttcagctgttctgtgatgcacgaagccctgcacaaccactacacccagaaaagcctgtctctgagccccggcaagtgataaggatccgatctggtactgcatgcacgcaatgctagctgcccctttcccgtcctgggtaccccgagtctcccccgacctcgggtcccaggtatgctcccacctccacctgccccactcaccacctctgctagttccagacacctcccaagcacgcagcaatgcagctcaaaacgcttagcctagccacacccccacgggaaacagcagtgattaacctttagcaataaacgaaagtttaactaagctatactaaccccagggttggtcaatttcgtgccagccacaccctcgagctagcaaaaaaaaaaaaaaaaaaaaaaaaaaaaaagcatatgactaaaaaaaaaaaaaaaaaaaaaaaaaaaaaaaaaaaaaaaaaaaaaaaaaaaaaaaaaaaaaaaaaaaaaa

SEQ ID NO: 932 - RNA, 1949 nt, synthetic construct
  source 1..1949: mol_type = other RNA
agaataaactagtattcttctggtccccacagactcagagagaacccgccaccatggattggatctggcgcatcctgtttctcgtgggagctgccacaggcgcccactctcaagttcacctgacacagtctggccccgaagtgcggaagcctggcacaagcgtgaaggtgtcctgtaaagcccctggcaacaccctgaaaacctacgacctgcactgggtccgatctgtgcctggacaaggactgcagtggatgggctggattagccacgagggcgacaagaaagtgatcgtggaacggttcaaggccaaagtgaccatcgactgggacagaagcaccaacaccgcctacctgcagctgagcggactgacatctggcgataccgccgtgtactactgtgccaagggcagcaagcaccggctgagagattacgccctgtacgacgatgacggcgccctgaattgggccgtcgatgtggactacctgagcaacctggaattctggggccagggaacagccgtgacagtgtctagtgcatctgtggccgctcctagcgtgttcatcttcccacctagcgacgaggaactgaagtctggcacagccagcgtcgtgtgcctgctgaacaacttctaccccagagaagccaaggtgcagtggaaggtggacaacgccctgcagagcggcaatagccaagagagcgtgaccgagcaggacagcaaggactctacctacagcctgagcagcaccctgacactgagcaaggccgactacgagaagcacaaagtgtacgcctgcgaagtgacccaccagggcctttctagccctgtgaccaagagcttcaaccggggcgagtgcgataagacccacacctgtcctccatgtccagctccagaactgctcggcggaccttccgtgttcctgtttcctccaaagcctaaggacaccctgatgatcagcagaacccctgaagtgacctgcgtggtggtggatgtgtctcacgaggaccccgaagtgaagttcaattggtacgtggacggcgtggaagtgcacaacgccaagaccaagcctagagaggaacagtacaacagcacctacagagtggtgtccgtgctgacagtgctgcaccaggattggctgaacggcaaagagtacaagtgcaaggtgtccaacaaggccctgcctgctcctatcgagaaaaccatcagcaaggccaagggccagcctagggaaccccaggtttacacactgcctccaagccgcgacgaactgaccaagaaccaggtgtccctgacctgcctcgtgaagggcttctacccttccgatatcgccgtggaatgggagagcaatggccagcctgagaacaactacaagacaacccctcctgtgctggacagcgacggctcattcttcctgtacagcaagctgaccgtggacaagtccagatggcagcagggcaacgtgttcagctgtagcgtgctgcacgaagccctgcacagccactacacccagaaaagcctgtctctgagccccggcaaatgataaggatccgatctggtactgcatgcacgcaatgctagctgcccctttcccgtcctgggtaccccgagtctcccccgacctcgggtcccaggtatgctcccacctccacctgccccactcaccacctctgctagttccagacacctcccaagcacgcagcaatgcagctcaaaacgcttagcctagccacacccccacgggaaacagcagtgattaacctttagcaataaacgaaagtttaactaagctatactaaccccagggttggtcaatttcgtgccagccacaccctcgagctagcaaaaaaaaaaaaaaaaaaaaaaaaaaaaaagcatatgactaaaaaaaaaaaaaaaaaaaaaaaaaaaaaaaaaaaaaaaaaaaaaaaaaaaaaaaaaaaaaaaaaaaaaa

SEQ ID NO: 933 - RNA, 1949 nt, synthetic construct
  source 1..1949: mol_type = other RNA
agaataaactagtattcttctggtccccacagactcagagagaacccgccaccatggattggatctggcgcatcctgtttctcgtgggagctgccacaggcgcccactctcaagttcacctgacacagtctggccccgaagtgcggaagcctggcacaagcgtgaaggtgtcctgtaaagcccctggcaacaccctgaaaacctacgacctgcactgggtccgatctgtgcctggacaaggactgcagtggatgggctggattagccacgagggcgacaagaaagtgatcgtggaacggttcaaggccaaagtgaccatcgactgggacagaagcaccaacaccgcctacctgcagctgagcggactgacatctggcgataccgccgtgtactactgtgccaagggcagcaagcaccggctgagagattacgccctgtacgacgatgacggcgccctgaattgggccgtcgatgtggactacctgagcaacctggaattctggggccagggaacagccgtgacagtgtctagtgcatctgtggccgctcctagcgtgttcatcttcccacctagcgacgaggaactgaagtctggcacagccagcgtcgtgtgcctgctgaacaacttctaccccagagaagccaaggtgcagtggaaggtggacaacgccctgcagagcggcaatagccaagagagcgtgaccgagcaggacagcaaggactctacctacagcctgagcagcaccctgacactgagcaaggccgactacgagaagcacaaagtgtacgcctgcgaagtgacccaccagggcctttctagccctgtgaccaagagcttcaaccggggcgagtgcgataagacccacacctgtcctccatgtccagctccagaactgctggccggaccttccgtgttcctgtttcctccaaagcctaaggacaccctgatgatcagcagaacccctgaagtgacctgcgtggtggtggatgtgtctcacgaggaccccgaagtgaagttcaattggtacgtggacggcgtggaagtgcacaatgccaagaccaagcctagagaggaacagtacaacagcacctacagagtggtgtccgtgctgaccgtgctgcaccaggattggctgaacggcaaagagtacaagtgcaaggtgtccaacaaggccctgcctctgcctgaggaaaagaccatcagcaaggccaagggccagcctagggaaccccaggtttacacactgcctccaagccgcgacgaactgaccaagaaccaggtgtccctgacctgcctcgtgaagggcttctacccttccgatatcgccgtggaatgggagagcaatggccagcctgagaacaactacaagacaacccctcctgtgctggacagcgacggctcattcttcctgtacagcaagctgaccgtggacaagtccagatggcagcagggcaacgtgttcagctgtagcgtgctgcacgaagccctgcacagccactacacccagaaaagcctgtctctgagccccggcaaatgataaggatccgatctggtactgcatgcacgcaatgctagctgcccctttcccgtcctgggtaccccgagtctcccccgacctcgggtcccaggtatgctcccacctccacctgccccactcaccacctctgctagttccagacacctcccaagcacgcagcaatgcagctcaaaacgcttagcctagccacacccccacgggaaacagcagtgattaacctttagcaataaacgaaagtttaactaagctatactaaccccagggttggtcaatttcgtgccagccacaccctcgagctagcaaaaaaaaaaaaaaaaaaaaaaaaaaaaaagcatatgactaaaaaaaaaaaaaaaaaaaaaaaaaaaaaaaaaaaaaaaaaaaaaaaaaaaaaaaaaaaaaaaaaaaaaa

SEQ ID NO: 934 - RNA, 1949 nt, synthetic construct
  source 1..1949: mol_type = other RNA
agaataaactagtattcttctggtccccacagactcagagagaacccgccaccatggattggatctggcgcatcctgtttctcgtgggagctgccacaggcgcccactctcaagttcacctgacacagtctggccccgaagtgcggaagcctggcacaagcgtgaaggtgtcctgtaaagcccctggcaacaccctgaaaacctacgacctgcactgggtccgatctgtgcctggacaaggactgcagtggatgggctggattagccacgagggcgacaagaaagtgatcgtggaacggttcaaggccaaagtgaccatcgactgggacagaagcaccaacaccgcctacctgcagctgagcggactgacatctggcgataccgccgtgtactactgtgccaagggcagcaagcaccggctgagagattacgccctgtacgacgatgacggcgccctgaattgggccgtcgatgtggactacctgagcaacctggaattctggggccagggaacagccgtgacagtgtctagtgcatctgtggccgctcctagcgtgttcatcttcccacctagcgacgaggaactgaagtctggcacagccagcgtcgtgtgcctgctgaacaacttctaccccagagaagccaaggtgcagtggaaggtggacaacgccctgcagagcggcaatagccaagagagcgtgaccgagcaggacagcaaggactctacctacagcctgagcagcaccctgacactgagcaaggccgactacgagaagcacaaagtgtacgcctgcgaagtgacccaccagggcctttctagccctgtgaccaagagcttcaaccggggcgagtgcgataagacccacacctgtcctccatgtccagctccagaactgctggccggaccttccgtgttcctgtttcctccaaagcctaaggacaccctgatgatcagcagaacccctgaagtgacctgcgtggtggtggatgtgtctcacgaggaccctgaagtgaagttcaattggtacgtggacggcgtggaagtgcacaacgccaagaccaagcctagagaggaacagtacaacagcacctacagagtggtgtccgtgctgaccgtgctgcaccaggattggctgaacggcaaagagtacaagtgcaaggtgtccaacaaggccctgcctgcccctgaggaaaagaccatcagcaaggccaagggccagcctagggaaccccaggtttacacactgcctccaagccgcgacgaactgaccaagaaccaggtgtccctgacctgcctcgtgaagggcttctacccttccgatatcgccgtggaatgggagagcaatggccagcctgagaacaactacaagacaacccctcctgtgctggacagcgacggctcattcttcctgtacagcaagctgaccgtggacaagtccagatggcagcagggcaacgtgttcagctgtagcgtgctgcacgaagccctgcacagccactacacccagaaaagcctgtctctgagccccggcaaatgataaggatccgatctggtactgcatgcacgcaatgctagctgcccctttcccgtcctgggtaccccgagtctcccccgacctcgggtcccaggtatgctcccacctccacctgccccactcaccacctctgctagttccagacacctcccaagcacgcagcaatgcagctcaaaacgcttagcctagccacacccccacgggaaacagcagtgattaacctttagcaataaacgaaagtttaactaagctatactaaccccagggttggtcaatttcgtgccagccacaccctcgagctagcaaaaaaaaaaaaaaaaaaaaaaaaaaaaaagcatatgactaaaaaaaaaaaaaaaaaaaaaaaaaaaaaaaaaaaaaaaaaaaaaaaaaaaaaaaaaaaaaaaaaaaaaa

SEQ ID NO: 935 - RNA, 1949 nt, synthetic construct
  source 1..1949: mol_type = other RNA
agaataaactagtattcttctggtccccacagactcagagagaacccgccaccatggattggatctggcgcatcctgtttctcgtgggagctgccacaggcgcccactctcaagttcacctgacacagtctggccccgaagtgcggaagcctggcacaagcgtgaaggtgtcctgtaaagcccctggcaacaccctgaaaacctacgacctgcactgggtccgatctgtgcctggacaaggactgcagtggatgggctggattagccacgagggcgacaagaaagtgatcgtggaacggttcaaggccaaagtgaccatcgactgggacagaagcaccaacaccgcctacctgcagctgagcggactgacatctggcgataccgccgtgtactactgtgccaagggcagcaagcaccggctgagagattacgccctgtacgacgatgacggcgccctgaattgggccgtcgatgtggactacctgagcaacctggaattctggggccagggaacagccgtgacagtgtctagtgcatctgtggccgctcctagcgtgttcatcttcccacctagcgacgaggaactgaagtctggcacagccagcgtcgtgtgcctgctgaacaacttctaccccagagaagccaaggtgcagtggaaggtggacaacgccctgcagagcggcaatagccaagagagcgtgaccgagcaggacagcaaggactctacctacagcctgagcagcaccctgacactgagcaaggccgactacgagaagcacaaagtgtacgcctgcgaagtgacccaccagggcctttctagccctgtgaccaagagcttcaaccggggcgagtgcgataagacccacacctgtcctccatgtccagctccagaactgctggccggaccttccgtgttcctgtttcctccaaagcctaaggacaccctgatgatcagcagaacccctgaagtgacctgcgtggtggtggatgtgtctcacgaggaccctgaagtgaagttcaattggtacgtggacggcgtggaagtgcacaacgccaagaccaagcctagagaggaacagtacaacagcacctacagagtggtgtccgtgctgaccgtgctgcaccaggattggctgaacggcaaagagtacaagtgcaaggtgtccaacaaggccctgcctgcccctatcgaaaagaccatcagcaaggccaagggccagcctagggaaccccaggtttacacactgcctccaagccgcgacgaactgaccaagaaccaggtgtccctgacctgcctcgtgaagggcttctacccttccgatatcgccgtggaatgggagagcaatggccagcctgagaacaactacaagacaacccctcctgtgctggacagcgacggctcattcttcctgtacagcaagctgaccgtggacaagtccagatggcagcagggcaacgtgttcagctgtagcgtgctgcacgaagccctgcacagccactacacccagaaaagcctgtctctgagccccggcaaatgataaggatccgatctggtactgcatgcacgcaatgctagctgcccctttcccgtcctgggtaccccgagtctcccccgacctcgggtcccaggtatgctcccacctccacctgccccactcaccacctctgctagttccagacacctcccaagcacgcagcaatgcagctcaaaacgcttagcctagccacacccccacgggaaacagcagtgattaacctttagcaataaacgaaagtttaactaagctatactaaccccagggttggtcaatttcgtgccagccacaccctcgagctagcaaaaaaaaaaaaaaaaaaaaaaaaaaaaaagcatatgactaaaaaaaaaaaaaaaaaaaaaaaaaaaaaaaaaaaaaaaaaaaaaaaaaaaaaaaaaaaaaaaaaaaaaa

SEQ ID NO: 936 - RNA, 1949 nt, synthetic construct
  source 1..1949: mol_type = other RNA
agaataaactagtattcttctggtccccacagactcagagagaacccgccaccatggattggatctggcgcatcctgtttctcgtgggagctgccacaggcgcccactctcaagttcacctgacacagtctggccccgaagtgcggaagcctggcacaagcgtgaaggtgtcctgtaaagcccctggcaacaccctgaaaacctacgacctgcactgggtccgatctgtgcctggacaaggactgcagtggatgggctggattagccacgagggcgacaagaaagtgatcgtggaacggttcaaggccaaagtgaccatcgactgggacagaagcaccaacaccgcctacctgcagctgagcggactgacatctggcgataccgccgtgtactactgtgccaagggcagcaagcaccggctgagagattacgccctgtacgacgatgacggcgccctgaattgggccgtcgatgtggactacctgagcaacctggaattctggggccagggaacagccgtgacagtgtctagtgcatctgtggccgctcctagcgtgttcatcttcccacctagcgacgaggaactgaagtctggcacagccagcgtcgtgtgcctgctgaacaacttctaccccagagaagccaaggtgcagtggaaggtggacaacgccctgcagagcggcaatagccaagagagcgtgaccgagcaggacagcaaggactctacctacagcctgagcagcaccctgacactgagcaaggccgactacgagaagcacaaagtgtacgcctgcgaagtgacccaccagggcctttctagccctgtgaccaagagcttcaaccggggcgagtgcgataagacccacacctgtcctccatgtccagctccagaactgctgggcggaccttccgtgttcctgtttcctccaaagcctaaggacaccctgatgatcagcagaacccctgaagtgacctgcgtggtggtggatgtgtctcacgaggaccctgaagtgaagttcaattggtacgtggacggcgtggaagtgcacaacgccaagaccaagcctagagaggaacagtacaacagcacctacagagtggtgtccgtgctgaccgtgctgcaccaggattggctgaacggcaaagagtacaagtgcaaggtgtccaacaaggccctgcctgcccctgaggaaaagaccatcagcaaggccaagggccagcctagggaaccccaggtttacacactgcctccaagccgcgacgaactgaccaagaaccaggtgtccctgacctgcctcgtgaagggcttctacccttccgatatcgccgtggaatgggagagcaatggccagcctgagaacaactacaagacaacccctcctgtgctggacagcgacggctcattcttcctgtacagcaagctgaccgtggacaagtccagatggcagcagggcaacgtgttcagctgtagcgtgctgcacgaagccctgcacagccactacacccagaaaagcctgtctctgagccccggcaaatgataaggatccgatctggtactgcatgcacgcaatgctagctgcccctttcccgtcctgggtaccccgagtctcccccgacctcgggtcccaggtatgctcccacctccacctgccccactcaccacctctgctagttccagacacctcccaagcacgcagcaatgcagctcaaaacgcttagcctagccacacccccacgggaaacagcagtgattaacctttagcaataaacgaaagtttaactaagctatactaaccccagggttggtcaatttcgtgccagccacaccctcgagctagcaaaaaaaaaaaaaaaaaaaaaaaaaaaaaagcatatgactaaaaaaaaaaaaaaaaaaaaaaaaaaaaaaaaaaaaaaaaaaaaaaaaaaaaaaaaaaaaaaaaaaaaaa

SEQ ID NO: 937 - RNA, 1949 nt, synthetic construct
  source 1..1949: mol_type = other RNA
agaataaactagtattcttctggtccccacagactcagagagaacccgccaccatggattggatctggcgcatcctgtttctcgtgggagctgccacaggcgcccactctcaagttcacctgacacagtctggccccgaagtgcggaagcctggcacaagcgtgaaggtgtcctgtaaagcccctggcaacaccctgaaaacctacgacctgcactgggtccgatctgtgcctggacaaggactgcagtggatgggctggattagccacgagggcgacaagaaagtgatcgtggaacggttcaaggccaaagtgaccatcgactgggacagaagcaccaacaccgcctacctgcagctgagcggactgacatctggcgataccgccgtgtactactgtgccaagggcagcaagcaccggctgagagattacgccctgtacgacgatgacggcgccctgaattgggccgtcgatgtggactacctgagcaacctggaattctggggccagggaacagccgtgacagtgtctagtgcatctgtggccgctcctagcgtgttcatcttcccacctagcgacgaggaactgaagtctggcacagccagcgtcgtgtgcctgctgaacaacttctaccccagagaagccaaggtgcagtggaaggtggacaacgccctgcagagcggcaatagccaagagagcgtgaccgagcaggacagcaaggactctacctacagcctgagcagcaccctgacactgagcaaggccgactacgagaagcacaaagtgtacgcctgcgaagtgacccaccagggcctttctagccctgtgaccaagagcttcaaccggggcgagtgcgataagacccacacctgtcctccatgtccagctccagaactgctcggcggaccttccgtgttcctgtttcctccaaagcctaaggacaccctgatgatcagcagaacccctgaagtgacctgcgtggtggtggatgtgtctcacgaggaccccgaagtgaagttcaattggtacgtggacggcgtggaagtgcacaacgccaagaccaagcctagagaggaacagtacaacagcacctacagagtggtgtccgtgctgacagtgctgcaccaggattggctgaacggcaaagagtacaagtgcaaggtgtccaacaaggccctgcctgctcctatcgagaaaaccatcagcaaggccaagggccagcctcgcgaacctcaagtctgtacactgcctcctagccgcgacgaactgaccaagaaccaggtgtccctgagctgcgccgtgaagggcttttacccttccgatatcgccgtggaatgggagagcaatggccagcctgagaacaactacaagacaacccctcctgtgctggacagcgacggctcattcttcctggtgtccaagctgacagtggacaagagcagatggcagcagggcaacgtgttcagctgcagcgtgctgcatgaagccctgcacagccactacacccagaagtccctgtctctgagccccggcaagtgataaggatccgatctggtactgcatgcacgcaatgctagctgcccctttcccgtcctgggtaccccgagtctcccccgacctcgggtcccaggtatgctcccacctccacctgccccactcaccacctctgctagttccagacacctcccaagcacgcagcaatgcagctcaaaacgcttagcctagccacacccccacgggaaacagcagtgattaacctttagcaataaacgaaagtttaactaagctatactaaccccagggttggtcaatttcgtgccagccacaccctcgagctagcaaaaaaaaaaaaaaaaaaaaaaaaaaaaaagcatatgactaaaaaaaaaaaaaaaaaaaaaaaaaaaaaaaaaaaaaaaaaaaaaaaaaaaaaaaaaaaaaaaaaaaaaa

SEQ ID NO: 938 - RNA, 1949 nt, synthetic construct
  source 1..1949: mol_type = other RNA
agaataaactagtattcttctggtccccacagactcagagagaacccgccaccatggattggatctggcgcatcctgtttctcgtgggagctgccacaggcgcccactctcaagttcacctgacacagtctggccccgaagtgcggaagcctggcacaagcgtgaaggtgtcctgtaaagcccctggcaacaccctgaaaacctacgacctgcactgggtccgatctgtgcctggacaaggactgcagtggatgggctggattagccacgagggcgacaagaaagtgatcgtggaacggttcaaggccaaagtgaccatcgactgggacagaagcaccaacaccgcctacctgcagctgagcggactgacatctggcgataccgccgtgtactactgtgccaagggcagcaagcaccggctgagagattacgccctgtacgacgatgacggcgccctgaattgggccgtcgatgtggactacctgagcaacctggaattctggggccagggaacagccgtgacagtgtctagtgcatctgtggccgctcctagcgtgttcatcttcccacctagcgacgaggaactgaagtctggcacagccagcgtcgtgtgcctgctgaacaacttctaccccagagaagccaaggtgcagtggaaggtggacaacgccctgcagagcggcaatagccaagagagcgtgaccgagcaggacagcaaggactctacctacagcctgagcagcaccctgacactgagcaaggccgactacgagaagcacaaagtgtacgcctgcgaagtgacccaccagggcctttctagccctgtgaccaagagcttcaaccggggcgagtgcgataagacccacacctgtcctccatgtccagctccagaactgctggccggaccttccgtgttcctgtttcctccaaagcctaaggacaccctgatgatcagcagaacccctgaagtgacctgcgtggtggtggatgtgtctcacgaggaccccgaagtgaagttcaattggtacgtggacggcgtggaagtgcacaatgccaagaccaagcctagagaggaacagtacaacagcacctacagagtggtgtccgtgctgaccgtgctgcaccaggattggctgaacggcaaagagtacaagtgcaaggtgtccaacaaggccctgcctctgcctgaggaaaagaccatcagcaaggccaagggccagcctcgcgaacctcaagtctgtacactgcctcctagccgcgacgaactgaccaagaaccaggtgtccctgagctgcgccgtgaagggcttttacccttccgatatcgccgtggaatgggagagcaatggccagcctgagaacaactacaagacaacccctcctgtgctggacagcgacggctcattcttcctggtgtccaagctgacagtggacaagagcagatggcagcagggcaacgtgttcagctgcagcgtgctgcatgaagccctgcacagccactacacccagaagtccctgtctctgagccccggcaagtgataaggatccgatctggtactgcatgcacgcaatgctagctgcccctttcccgtcctgggtaccccgagtctcccccgacctcgggtcccaggtatgctcccacctccacctgccccactcaccacctctgctagttccagacacctcccaagcacgcagcaatgcagctcaaaacgcttagcctagccacacccccacgggaaacagcagtgattaacctttagcaataaacgaaagtttaactaagctatactaaccccagggttggtcaatttcgtgccagccacaccctcgagctagcaaaaaaaaaaaaaaaaaaaaaaaaaaaaaagcatatgactaaaaaaaaaaaaaaaaaaaaaaaaaaaaaaaaaaaaaaaaaaaaaaaaaaaaaaaaaaaaaaaaaaaaaa

SEQ ID NO: 939 - RNA, 1949 nt, synthetic construct
  source 1..1949: mol_type = other RNA
agaataaactagtattcttctggtccccacagactcagagagaacccgccaccatggattggatctggcgcatcctgtttctcgtgggagctgccacaggcgcccactctcaagttcacctgacacagtctggccccgaagtgcggaagcctggcacaagcgtgaaggtgtcctgtaaagcccctggcaacaccctgaaaacctacgacctgcactgggtccgatctgtgcctggacaaggactgcagtggatgggctggattagccacgagggcgacaagaaagtgatcgtggaacggttcaaggccaaagtgaccatcgactgggacagaagcaccaacaccgcctacctgcagctgagcggactgacatctggcgataccgccgtgtactactgtgccaagggcagcaagcaccggctgagagattacgccctgtacgacgatgacggcgccctgaattgggccgtcgatgtggactacctgagcaacctggaattctggggccagggaacagccgtgacagtgtctagtgcatctgtggccgctcctagcgtgttcatcttcccacctagcgacgaggaactgaagtctggcacagccagcgtcgtgtgcctgctgaacaacttctaccccagagaagccaaggtgcagtggaaggtggacaacgccctgcagagcggcaatagccaagagagcgtgaccgagcaggacagcaaggactctacctacagcctgagcagcaccctgacactgagcaaggccgactacgagaagcacaaagtgtacgcctgcgaagtgacccaccagggcctttctagccctgtgaccaagagcttcaaccggggcgagtgcgataagacccacacctgtcctccatgtccagctccagaactgctggccggaccttccgtgttcctgtttcctccaaagcctaaggacaccctgatgatcagcagaacccctgaagtgacctgcgtggtggtggatgtgtctcacgaggaccctgaagtgaagttcaattggtacgtggacggcgtggaagtgcacaacgccaagaccaagcctagagaggaacagtacaacagcacctacagagtggtgtccgtgctgaccgtgctgcaccaggattggctgaacggcaaagagtacaagtgcaaggtgtccaacaaggccctgcctgcccctgaggaaaagaccatcagcaaggccaagggccagcctcgcgaacctcaagtctgtacactgcctcctagccgcgacgaactgaccaagaaccaggtgtccctgagctgcgccgtgaagggcttttacccttccgatatcgccgtggaatgggagagcaatggccagcctgagaacaactacaagacaacccctcctgtgctggacagcgacggctcattcttcctggtgtccaagctgacagtggacaagagcagatggcagcagggcaacgtgttcagctgcagcgtgctgcatgaagccctgcacagccactacacccagaagtccctgtctctgagccccggcaagtgataaggatccgatctggtactgcatgcacgcaatgctagctgcccctttcccgtcctgggtaccccgagtctcccccgacctcgggtcccaggtatgctcccacctccacctgccccactcaccacctctgctagttccagacacctcccaagcacgcagcaatgcagctcaaaacgcttagcctagccacacccccacgggaaacagcagtgattaacctttagcaataaacgaaagtttaactaagctatactaaccccagggttggtcaatttcgtgccagccacaccctcgagctagcaaaaaaaaaaaaaaaaaaaaaaaaaaaaaagcatatgactaaaaaaaaaaaaaaaaaaaaaaaaaaaaaaaaaaaaaaaaaaaaaaaaaaaaaaaaaaaaaaaaaaaaaa

SEQ ID NO: 940 - RNA, 1949 nt, synthetic construct
  source 1..1949: mol_type = other RNA
agaataaactagtattcttctggtccccacagactcagagagaacccgccaccatggattggatctggcgcatcctgtttctcgtgggagctgccacaggcgcccactctcaagttcacctgacacagtctggccccgaagtgcggaagcctggcacaagcgtgaaggtgtcctgtaaagcccctggcaacaccctgaaaacctacgacctgcactgggtccgatctgtgcctggacaaggactgcagtggatgggctggattagccacgagggcgacaagaaagtgatcgtggaacggttcaaggccaaagtgaccatcgactgggacagaagcaccaacaccgcctacctgcagctgagcggactgacatctggcgataccgccgtgtactactgtgccaagggcagcaagcaccggctgagagattacgccctgtacgacgatgacggcgccctgaattgggccgtcgatgtggactacctgagcaacctggaattctggggccagggaacagccgtgacagtgtctagtgcatctgtggccgctcctagcgtgttcatcttcccacctagcgacgaggaactgaagtctggcacagccagcgtcgtgtgcctgctgaacaacttctaccccagagaagccaaggtgcagtggaaggtggacaacgccctgcagagcggcaatagccaagagagcgtgaccgagcaggacagcaaggactctacctacagcctgagcagcaccctgacactgagcaaggccgactacgagaagcacaaagtgtacgcctgcgaagtgacccaccagggcctttctagccctgtgaccaagagcttcaaccggggcgagtgcgataagacccacacctgtcctccatgtccagctccagaactgctggccggaccttccgtgttcctgtttcctccaaagcctaaggacaccctgatgatcagcagaacccctgaagtgacctgcgtggtggtggatgtgtctcacgaggaccctgaagtgaagttcaattggtacgtggacggcgtggaagtgcacaacgccaagaccaagcctagagaggaacagtacaacagcacctacagagtggtgtccgtgctgaccgtgctgcaccaggattggctgaacggcaaagagtacaagtgcaaggtgtccaacaaggccctgcctgcccctatcgaaaagaccatcagcaaggccaagggccagcctcgcgaacctcaagtctgtacactgcctcctagccgcgacgaactgaccaagaaccaggtgtccctgagctgcgccgtgaagggcttttacccttccgatatcgccgtggaatgggagagcaatggccagcctgagaacaactacaagacaacccctcctgtgctggacagcgacggctcattcttcctggtgtccaagctgacagtggacaagagcagatggcagcagggcaacgtgttcagctgcagcgtgctgcatgaagccctgcacagccactacacccagaagtccctgtctctgagccccggcaagtgataaggatccgatctggtactgcatgcacgcaatgctagctgcccctttcccgtcctgggtaccccgagtctcccccgacctcgggtcccaggtatgctcccacctccacctgccccactcaccacctctgctagttccagacacctcccaagcacgcagcaatgcagctcaaaacgcttagcctagccacacccccacgggaaacagcagtgattaacctttagcaataaacgaaagtttaactaagctatactaaccccagggttggtcaatttcgtgccagccacaccctcgagctagcaaaaaaaaaaaaaaaaaaaaaaaaaaaaaagcatatgactaaaaaaaaaaaaaaaaaaaaaaaaaaaaaaaaaaaaaaaaaaaaaaaaaaaaaaaaaaaaaaaaaaaaaa

SEQ ID NO: 941 - RNA, 1949 nt, synthetic construct
  source 1..1949: mol_type = other RNA
agaataaactagtattcttctggtccccacagactcagagagaacccgccaccatggattggatctggcgcatcctgtttctcgtgggagctgccacaggcgcccactctcaagttcacctgacacagtctggccccgaagtgcggaagcctggcacaagcgtgaaggtgtcctgtaaagcccctggcaacaccctgaaaacctacgacctgcactgggtccgatctgtgcctggacaaggactgcagtggatgggctggattagccacgagggcgacaagaaagtgatcgtggaacggttcaaggccaaagtgaccatcgactgggacagaagcaccaacaccgcctacctgcagctgagcggactgacatctggcgataccgccgtgtactactgtgccaagggcagcaagcaccggctgagagattacgccctgtacgacgatgacggcgccctgaattgggccgtcgatgtggactacctgagcaacctggaattctggggccagggaacagccgtgacagtgtctagtgcatctgtggccgctcctagcgtgttcatcttcccacctagcgacgaggaactgaagtctggcacagccagcgtcgtgtgcctgctgaacaacttctaccccagagaagccaaggtgcagtggaaggtggacaacgccctgcagagcggcaatagccaagagagcgtgaccgagcaggacagcaaggactctacctacagcctgagcagcaccctgacactgagcaaggccgactacgagaagcacaaagtgtacgcctgcgaagtgacccaccagggcctttctagccctgtgaccaagagcttcaaccggggcgagtgcgataagacccacacctgtcctccatgtccagctccagaactgctgggcggaccttccgtgttcctgtttcctccaaagcctaaggacaccctgatgatcagcagaacccctgaagtgacctgcgtggtggtggatgtgtctcacgaggaccctgaagtgaagttcaattggtacgtggacggcgtggaagtgcacaacgccaagaccaagcctagagaggaacagtacaacagcacctacagagtggtgtccgtgctgaccgtgctgcaccaggattggctgaacggcaaagagtacaagtgcaaggtgtccaacaaggccctgcctgcccctgaggaaaagaccatcagcaaggccaagggccagcctcgcgaacctcaagtctgtacactgcctcctagccgcgacgaactgaccaagaaccaggtgtccctgagctgcgccgtgaagggcttttacccttccgatatcgccgtggaatgggagagcaatggccagcctgagaacaactacaagacaacccctcctgtgctggacagcgacggctcattcttcctggtgtccaagctgacagtggacaagagcagatggcagcagggcaacgtgttcagctgcagcgtgctgcatgaagccctgcacagccactacacccagaagtccctgtctctgagccccggcaagtgataaggatccgatctggtactgcatgcacgcaatgctagctgcccctttcccgtcctgggtaccccgagtctcccccgacctcgggtcccaggtatgctcccacctccacctgccccactcaccacctctgctagttccagacacctcccaagcacgcagcaatgcagctcaaaacgcttagcctagccacacccccacgggaaacagcagtgattaacctttagcaataaacgaaagtttaactaagctatactaaccccagggttggtcaatttcgtgccagccacaccctcgagctagcaaaaaaaaaaaaaaaaaaaaaaaaaaaaaagcatatgactaaaaaaaaaaaaaaaaaaaaaaaaaaaaaaaaaaaaaaaaaaaaaaaaaaaaaaaaaaaaaaaaaaaaaa

SEQ ID NO: 942 - RNA, 1949 nt, synthetic construct
  source 1..1949: mol_type = other RNA
agaataaactagtattcttctggtccccacagactcagagagaacccgccaccatggattggatctggcgcatcctgtttctcgtgggagctgccacaggcgcccactctcaagttcacctgacacagtctggccccgaagtgcggaagcctggcacaagcgtgaaggtgtcctgtaaagcccctggcaacaccctgaaaacctacgacctgcactgggtccgatctgtgcctggacaaggactgcagtggatgggctggattagccacgagggcgacaagaaagtgatcgtggaacggttcaaggccaaagtgaccatcgactgggacagaagcaccaacaccgcctacctgcagctgagcggactgacatctggcgataccgccgtgtactactgtgccaagggcagcaagcaccggctgagagattacgccctgtacgacgatgacggcgccctgaattgggccgtcgatgtggactacctgagcaacctggaattctggggccagggaacagccgtgacagtgtctagtgcatctgtggccgctcctagcgtgttcatcttcccacctagcgacgaggaactgaagtctggcacagccagcgtcgtgtgcctgctgaacaacttctaccccagagaagccaaggtgcagtggaaggtggacaacgccctgcagagcggcaatagccaagagagcgtgaccgagcaggacagcaaggactctacctacagcctgagcagcaccctgacactgagcaaggccgactacgagaagcacaaagtgtacgcctgcgaagtgacccaccagggcctttctagccctgtgaccaagagcttcaaccggggcgagtgcgataagacccacacctgtcctccatgtccagctccagaactgctcggcggaccttccgtgttcctgtttcctccaaagcctaaggacaccctgatgatcagcagaacccctgaagtgacctgcgtggtggtggatgtgtctcacgaggaccccgaagtgaagttcaattggtacgtggacggcgtggaagtgcacaacgccaagaccaagcctagagaggaacagtacaacagcacctacagagtggtgtccgtgctgacagtgctgcaccaggattggctgaacggcaaagagtacaagtgcaaggtgtccaacaaggccctgcctgctcctatcgagaaaaccatcagcaaggccaagggccagcctagggaaccccaggtttacaccctgcctccatgccgcgacgaactgaccaagaaccaggtgtccctgtggtgcctggtcaagggcttctacccttccgatatcgccgtggaatgggagagcaatggccagcctgagaacaactacaagacaacccctcctgtgctggacagcgacggctcattcttcctgtacagcaagctgacagtggacaagagcagatggcagcagggcaacgtgttcagctgcagcgtgctgcatgaagccctgcacagccactacacccagaagtccctgtctctgagccccggcaagtgataaggatccgatctggtactgcatgcacgcaatgctagctgcccctttcccgtcctgggtaccccgagtctcccccgacctcgggtcccaggtatgctcccacctccacctgccccactcaccacctctgctagttccagacacctcccaagcacgcagcaatgcagctcaaaacgcttagcctagccacacccccacgggaaacagcagtgattaacctttagcaataaacgaaagtttaactaagctatactaaccccagggttggtcaatttcgtgccagccacaccctcgagctagcaaaaaaaaaaaaaaaaaaaaaaaaaaaaaagcatatgactaaaaaaaaaaaaaaaaaaaaaaaaaaaaaaaaaaaaaaaaaaaaaaaaaaaaaaaaaaaaaaaaaaaaaa

SEQ ID NO: 943 - RNA, 1949 nt, synthetic construct
  source 1..1949: mol_type = other RNA
agaataaactagtattcttctggtccccacagactcagagagaacccgccaccatggattggatctggcgcatcctgtttctcgtgggagctgccacaggcgcccactctcaagttcacctgacacagtctggccccgaagtgcggaagcctggcacaagcgtgaaggtgtcctgtaaagcccctggcaacaccctgaaaacctacgacctgcactgggtccgatctgtgcctggacaaggactgcagtggatgggctggattagccacgagggcgacaagaaagtgatcgtggaacggttcaaggccaaagtgaccatcgactgggacagaagcaccaacaccgcctacctgcagctgagcggactgacatctggcgataccgccgtgtactactgtgccaagggcagcaagcaccggctgagagattacgccctgtacgacgatgacggcgccctgaattgggccgtcgatgtggactacctgagcaacctggaattctggggccagggaacagccgtgacagtgtctagtgcatctgtggccgctcctagcgtgttcatcttcccacctagcgacgaggaactgaagtctggcacagccagcgtcgtgtgcctgctgaacaacttctaccccagagaagccaaggtgcagtggaaggtggacaacgccctgcagagcggcaatagccaagagagcgtgaccgagcaggacagcaaggactctacctacagcctgagcagcaccctgacactgagcaaggccgactacgagaagcacaaagtgtacgcctgcgaagtgacccaccagggcctttctagccctgtgaccaagagcttcaaccggggcgagtgcgataagacccacacctgtcctccatgtccagctccagaactgctggccggaccttccgtgttcctgtttcctccaaagcctaaggacaccctgatgatcagcagaacccctgaagtgacctgcgtggtggtggatgtgtctcacgaggaccccgaagtgaagttcaattggtacgtggacggcgtggaagtgcacaatgccaagaccaagcctagagaggaacagtacaacagcacctacagagtggtgtccgtgctgaccgtgctgcaccaggattggctgaacggcaaagagtacaagtgcaaggtgtccaacaaggccctgcctctgcctgaggaaaagaccatcagcaaggccaagggccagcctagggaaccccaggtttacaccctgcctccatgccgcgacgaactgaccaagaaccaggtgtccctgtggtgcctggtcaagggcttctacccttccgatatcgccgtggaatgggagagcaatggccagcctgagaacaactacaagacaacccctcctgtgctggacagcgacggctcattcttcctgtacagcaagctgacagtggacaagagcagatggcagcagggcaacgtgttcagctgcagcgtgctgcatgaagccctgcacagccactacacccagaagtccctgtctctgagccccggcaagtgataaggatccgatctggtactgcatgcacgcaatgctagctgcccctttcccgtcctgggtaccccgagtctcccccgacctcgggtcccaggtatgctcccacctccacctgccccactcaccacctctgctagttccagacacctcccaagcacgcagcaatgcagctcaaaacgcttagcctagccacacccccacgggaaacagcagtgattaacctttagcaataaacgaaagtttaactaagctatactaaccccagggttggtcaatttcgtgccagccacaccctcgagctagcaaaaaaaaaaaaaaaaaaaaaaaaaaaaaagcatatgactaaaaaaaaaaaaaaaaaaaaaaaaaaaaaaaaaaaaaaaaaaaaaaaaaaaaaaaaaaaaaaaaaaaaaa

SEQ ID NO: 944 - RNA, 1949 nt, synthetic construct
  source 1..1949: mol_type = other RNA
agaataaactagtattcttctggtccccacagactcagagagaacccgccaccatggattggatctggcgcatcctgtttctcgtgggagctgccacaggcgcccactctcaagttcacctgacacagtctggccccgaagtgcggaagcctggcacaagcgtgaaggtgtcctgtaaagcccctggcaacaccctgaaaacctacgacctgcactgggtccgatctgtgcctggacaaggactgcagtggatgggctggattagccacgagggcgacaagaaagtgatcgtggaacggttcaaggccaaagtgaccatcgactgggacagaagcaccaacaccgcctacctgcagctgagcggactgacatctggcgataccgccgtgtactactgtgccaagggcagcaagcaccggctgagagattacgccctgtacgacgatgacggcgccctgaattgggccgtcgatgtggactacctgagcaacctggaattctggggccagggaacagccgtgacagtgtctagtgcatctgtggccgctcctagcgtgttcatcttcccacctagcgacgaggaactgaagtctggcacagccagcgtcgtgtgcctgctgaacaacttctaccccagagaagccaaggtgcagtggaaggtggacaacgccctgcagagcggcaatagccaagagagcgtgaccgagcaggacagcaaggactctacctacagcctgagcagcaccctgacactgagcaaggccgactacgagaagcacaaagtgtacgcctgcgaagtgacccaccagggcctttctagccctgtgaccaagagcttcaaccggggcgagtgcgataagacccacacctgtcctccatgtccagctccagaactgctggccggaccttccgtgttcctgtttcctccaaagcctaaggacaccctgatgatcagcagaacccctgaagtgacctgcgtggtggtggatgtgtctcacgaggaccctgaagtgaagttcaattggtacgtggacggcgtggaagtgcacaacgccaagaccaagcctagagaggaacagtacaacagcacctacagagtggtgtccgtgctgaccgtgctgcaccaggattggctgaacggcaaagagtacaagtgcaaggtgtccaacaaggccctgcctgcccctgaggaaaagaccatcagcaaggccaagggccagcctagggaaccccaggtttacaccctgcctccatgccgcgacgaactgaccaagaaccaggtgtccctgtggtgcctggtcaagggcttctacccttccgatatcgccgtggaatgggagagcaatggccagcctgagaacaactacaagacaacccctcctgtgctggacagcgacggctcattcttcctgtacagcaagctgacagtggacaagagcagatggcagcagggcaacgtgttcagctgcagcgtgctgcatgaagccctgcacagccactacacccagaagtccctgtctctgagccccggcaagtgataaggatccgatctggtactgcatgcacgcaatgctagctgcccctttcccgtcctgggtaccccgagtctcccccgacctcgggtcccaggtatgctcccacctccacctgccccactcaccacctctgctagttccagacacctcccaagcacgcagcaatgcagctcaaaacgcttagcctagccacacccccacgggaaacagcagtgattaacctttagcaataaacgaaagtttaactaagctatactaaccccagggttggtcaatttcgtgccagccacaccctcgagctagcaaaaaaaaaaaaaaaaaaaaaaaaaaaaaagcatatgactaaaaaaaaaaaaaaaaaaaaaaaaaaaaaaaaaaaaaaaaaaaaaaaaaaaaaaaaaaaaaaaaaaaaaa

SEQ ID NO: 945 - RNA, 1949 nt, synthetic construct
  source 1..1949: mol_type = other RNA
agaataaactagtattcttctggtccccacagactcagagagaacccgccaccatggattggatctggcgcatcctgtttctcgtgggagctgccacaggcgcccactctcaagttcacctgacacagtctggccccgaagtgcggaagcctggcacaagcgtgaaggtgtcctgtaaagcccctggcaacaccctgaaaacctacgacctgcactgggtccgatctgtgcctggacaaggactgcagtggatgggctggattagccacgagggcgacaagaaagtgatcgtggaacggttcaaggccaaagtgaccatcgactgggacagaagcaccaacaccgcctacctgcagctgagcggactgacatctggcgataccgccgtgtactactgtgccaagggcagcaagcaccggctgagagattacgccctgtacgacgatgacggcgccctgaattgggccgtcgatgtggactacctgagcaacctggaattctggggccagggaacagccgtgacagtgtctagtgcatctgtggccgctcctagcgtgttcatcttcccacctagcgacgaggaactgaagtctggcacagccagcgtcgtgtgcctgctgaacaacttctaccccagagaagccaaggtgcagtggaaggtggacaacgccctgcagagcggcaatagccaagagagcgtgaccgagcaggacagcaaggactctacctacagcctgagcagcaccctgacactgagcaaggccgactacgagaagcacaaagtgtacgcctgcgaagtgacccaccagggcctttctagccctgtgaccaagagcttcaaccggggcgagtgcgataagacccacacctgtcctccatgtccagctccagaactgctggccggaccttccgtgttcctgtttcctccaaagcctaaggacaccctgatgatcagcagaacccctgaagtgacctgcgtggtggtggatgtgtctcacgaggaccctgaagtgaagttcaattggtacgtggacggcgtggaagtgcacaacgccaagaccaagcctagagaggaacagtacaacagcacctacagagtggtgtccgtgctgaccgtgctgcaccaggattggctgaacggcaaagagtacaagtgcaaggtgtccaacaaggccctgcctgcccctatcgaaaagaccatcagcaaggccaagggccagcctagggaaccccaggtttacaccctgcctccatgccgcgacgaactgaccaagaaccaggtgtccctgtggtgcctggtcaagggcttctacccttccgatatcgccgtggaatgggagagcaatggccagcctgagaacaactacaagacaacccctcctgtgctggacagcgacggctcattcttcctgtacagcaagctgacagtggacaagagcagatggcagcagggcaacgtgttcagctgcagcgtgctgcatgaagccctgcacagccactacacccagaagtccctgtctctgagccccggcaagtgataaggatccgatctggtactgcatgcacgcaatgctagctgcccctttcccgtcctgggtaccccgagtctcccccgacctcgggtcccaggtatgctcccacctccacctgccccactcaccacctctgctagttccagacacctcccaagcacgcagcaatgcagctcaaaacgcttagcctagccacacccccacgggaaacagcagtgattaacctttagcaataaacgaaagtttaactaagctatactaaccccagggttggtcaatttcgtgccagccacaccctcgagctagcaaaaaaaaaaaaaaaaaaaaaaaaaaaaaagcatatgactaaaaaaaaaaaaaaaaaaaaaaaaaaaaaaaaaaaaaaaaaaaaaaaaaaaaaaaaaaaaaaaaaaaaaa

SEQ ID NO: 946 - RNA, 1949 nt, synthetic construct
  source 1..1949: mol_type = other RNA
agaataaactagtattcttctggtccccacagactcagagagaacccgccaccatggattggatctggcgcatcctgtttctcgtgggagctgccacaggcgcccactctcaagttcacctgacacagtctggccccgaagtgcggaagcctggcacaagcgtgaaggtgtcctgtaaagcccctggcaacaccctgaaaacctacgacctgcactgggtccgatctgtgcctggacaaggactgcagtggatgggctggattagccacgagggcgacaagaaagtgatcgtggaacggttcaaggccaaagtgaccatcgactgggacagaagcaccaacaccgcctacctgcagctgagcggactgacatctggcgataccgccgtgtactactgtgccaagggcagcaagcaccggctgagagattacgccctgtacgacgatgacggcgccctgaattgggccgtcgatgtggactacctgagcaacctggaattctggggccagggaacagccgtgacagtgtctagtgcatctgtggccgctcctagcgtgttcatcttcccacctagcgacgaggaactgaagtctggcacagccagcgtcgtgtgcctgctgaacaacttctaccccagagaagccaaggtgcagtggaaggtggacaacgccctgcagagcggcaatagccaagagagcgtgaccgagcaggacagcaaggactctacctacagcctgagcagcaccctgacactgagcaaggccgactacgagaagcacaaagtgtacgcctgcgaagtgacccaccagggcctttctagccctgtgaccaagagcttcaaccggggcgagtgcgataagacccacacctgtcctccatgtccagctccagaactgctgggcggaccttccgtgttcctgtttcctccaaagcctaaggacaccctgatgatcagcagaacccctgaagtgacctgcgtggtggtggatgtgtctcacgaggaccctgaagtgaagttcaattggtacgtggacggcgtggaagtgcacaacgccaagaccaagcctagagaggaacagtacaacagcacctacagagtggtgtccgtgctgaccgtgctgcaccaggattggctgaacggcaaagagtacaagtgcaaggtgtccaacaaggccctgcctgcccctgaggaaaagaccatcagcaaggccaagggccagcctagggaaccccaggtttacaccctgcctccatgccgcgacgaactgaccaagaaccaggtgtccctgtggtgcctggtcaagggcttctacccttccgatatcgccgtggaatgggagagcaatggccagcctgagaacaactacaagacaacccctcctgtgctggacagcgacggctcattcttcctgtacagcaagctgacagtggacaagagcagatggcagcagggcaacgtgttcagctgcagcgtgctgcatgaagccctgcacagccactacacccagaagtccctgtctctgagccccggcaagtgataaggatccgatctggtactgcatgcacgcaatgctagctgcccctttcccgtcctgggtaccccgagtctcccccgacctcgggtcccaggtatgctcccacctccacctgccccactcaccacctctgctagttccagacacctcccaagcacgcagcaatgcagctcaaaacgcttagcctagccacacccccacgggaaacagcagtgattaacctttagcaataaacgaaagtttaactaagctatactaaccccagggttggtcaatttcgtgccagccacaccctcgagctagcaaaaaaaaaaaaaaaaaaaaaaaaaaaaaagcatatgactaaaaaaaaaaaaaaaaaaaaaaaaaaaaaaaaaaaaaaaaaaaaaaaaaaaaaaaaaaaaaaaaaaaaaa

SEQ ID NO: 947 - RNA, 1175 nt, synthetic construct
  source 1..1175: mol_type = other RNA
agaataaactagtattcttctggtccccacagactcagagagaacccgccaccatggattggatctggcgcatcctgtttctcgtgggagctgccacaggcgcccacagcgattttgtgctgacacagtctccccacagcctgagcgttacacctggcgagtctgccagcatcagctgcaagtctagccactctctgatccacggcgaccggaacaactacctggcttggtacgtgcagaagcccggcagatctcctcagctgctgatctacctggccagcagcagagctagcggcgtgccagatagattttctggcagcggcagcgacaaggacttcaccctgaagatctccagagtggaaaccgaggacgtgggcacctactactgtatgcagggcagagagagcccctggacatttggccagggcaccaaggtggacatcaagagcagcgcctctacaaagggccccagcgttttcccactggctcctagcagcaagagcacatctggcggaacagccgctctgggctgtctggtcaaggactactttcccgagcctgtgaccgtgtcctggaattctggcgctctgacatccggcgtgcacacctttccagctgtgctgcaaagcagcggcctgtactctctgagcagcgtggtcacagtgccaagctctagcctgggcacccagacctacatctgcaatgtgaaccacaagcctagcaacacgaaggtcgacaagagagtggaacccaagtcctgctgataaggatccgatctggtactgcatgcacgcaatgctagctgcccctttcccgtcctgggtaccccgagtctcccccgacctcgggtcccaggtatgctcccacctccacctgccccactcaccacctctgctagttccagacacctcccaagcacgcagcaatgcagctcaaaacgcttagcctagccacacccccacgggaaacagcagtgattaacctttagcaataaacgaaagtttaactaagctatactaaccccagggttggtcaatttcgtgccagccacaccctcgagctagcaaaaaaaaaaaaaaaaaaaaaaaaaaaaaagcatatgactaaaaaaaaaaaaaaaaaaaaaaaaaaaaaaaaaaaaaaaaaaaaaaaaaaaaaaaaaaaaaaaaaaaaaa

SEQ ID NO: 948 - RNA, 1175 nt, synthetic construct
  source 1..1175: mol_type = other RNA
agaataaactagtattcttctggtccccacagactcagagagaacccgccaccatggattggatctggcgcatcctgtttctcgtgggagctgccacaggcgcccacagcgattttgtgctgacacagtctccccacagcctgagcgttacacctggcgagtctgccagcatcagctgcaagtctagccactctctgatccacggcgaccggaacaactacctggcttggtacgtgcagaagcccggcagatctcctcagctgctgatctacctggccagcagcagagctagcggcgtgccagatagattttctggcagcggcagcgacaaggacttcaccctgaagatctccagagtggaaaccgaggacgtgggcacctactactgtatgcagggcagagagagcccctggacatttggccagggcaccaaggtggacatcaagagcagcgcctctacaaagggccccagcgttttcccactggctcctagcagcaagagcacatctggcggaacagccgctctgggctgtctggtcaaggactactttcccgagcctgtgaccgtgtcctggaattctggcgctctgacatccggcgtgcacacctttccagctgtgctgcaaagcagcggcctgtactctctgagcagcgtggtcacagtgccaagctctagcctgggcacccagacctacatctgcaatgtgaaccacaagcctagcaacacgaaggtcgacaagaaggtggaacccaagtcctgctgataaggatccgatctggtactgcatgcacgcaatgctagctgcccctttcccgtcctgggtaccccgagtctcccccgacctcgggtcccaggtatgctcccacctccacctgccccactcaccacctctgctagttccagacacctcccaagcacgcagcaatgcagctcaaaacgcttagcctagccacacccccacgggaaacagcagtgattaacctttagcaataaacgaaagtttaactaagctatactaaccccagggttggtcaatttcgtgccagccacaccctcgagctagcaaaaaaaaaaaaaaaaaaaaaaaaaaaaaagcatatgactaaaaaaaaaaaaaaaaaaaaaaaaaaaaaaaaaaaaaaaaaaaaaaaaaaaaaaaaaaaaaaaaaaaaaa

SEQ ID NO: 949 - RNA, 1937 nt, synthetic construct
  source 1..1937: mol_type = other RNA
agaataaactagtattcttctggtccccacagactcagagagaacccgccaccatggattggatctggcgcatcctgtttctcgtgggagctgccacaggcgcccactctcaagttcacctgacacagtctggccccgaagtgcggaagcctggcacaagcgtgaaggtgtcctgtaaagcccctggcaacaccctgaaaacctacgacctgcactgggtccgatctgtgcctggacaaggactgcagtggatgggctggattagccacgagggcgacaagaaagtgatcgtggaacggttcaaggccaaagtgaccatcgactgggacagaagcaccaacaccgcctacctgcagctgagcggactgacatctggcgataccgccgtgtactactgtgccaagggcagcaagcaccggctgagagattacgccctgtacgacgatgacggcgccctgaattgggccgtcgatgtggactacctgagcaacctggaattctggggccagggaacagccgtgacagtgtctagtgcttccacaaagggccctagcgtgttccctctggctcctagcagcaagtctacaagcggaggaacagctgccctgggctgcctggtggaagattactttcctgagcctgtgaccgtgtcctggaacagcggtgctctgacttctggcgtgcacacctttccagccgtgctgcaaagcagcggcctgtactctctgagcagcgtggtcacagtgccaagctctagcctgggcacccagacctacatctgcaatgtgaaccacaagcctagcaacaccaaggtggacgacagagtggaacccaagagctgcgacaagacccacacctgtcctccatgtcctgctccagaactgctcggcggaccttccgtgttcctgtttcctccaaagcctaaggacaccctgatgatcagcagaacccctgaagtgacctgcgtggtggtggatgtgtctcacgaggaccccgaagtgaagttcaattggtacgtggacggcgtggaagtgcacaacgccaagaccaagcctagagaggaacagtacaacagcacctacagagtggtgtccgtgctgacagtgctgcaccaggattggctgaacggcaaagagtacaagtgcaaggtgtccaacaaggccctgcctgctcctatcgagaaaaccatcagcaaggccaagggccagcctagggaaccccaggtttacacactgcctccaagccgcgaggaaatgaccaagaaccaggtgtccctgacctgcctcgtgaagggcttctacccttccgatatcgccgtggaatgggagagcaatggccagcctgagaacaactacaagacaacccctcctgtgctggacagcgacggctcattcttcctgtacagcaagctgactgtggataagtcccggtggcagcagggcaacgtgttcagctgttctgtgatgcacgaagccctgcacaaccactacacccagaaaagcctgtctctgagccccggcaagtgataaggatccgatctggtactgcatgcacgcaatgctagctgcccctttcccgtcctgggtaccccgagtctcccccgacctcgggtcccaggtatgctcccacctccacctgccccactcaccacctctgctagttccagacacctcccaagcacgcagcaatgcagctcaaaacgcttagcctagccacacccccacgggaaacagcagtgattaacctttagcaataaacgaaagtttaactaagctatactaaccccagggttggtcaatttcgtgccagccacaccctcgagctagcaaaaaaaaaaaaaaaaaaaaaaaaaaaaaagcatatgactaaaaaaaaaaaaaaaaaaaaaaaaaaaaaaaaaaaaaaaaaaaaaaaaaaaaaaaaaaaaaaaaaaaaaa

SEQ ID NO: 950 - RNA, 1937 nt, synthetic construct
  source 1..1937: mol_type = other RNA
agaataaactagtattcttctggtccccacagactcagagagaacccgccaccatggattggatctggcgcatcctgtttctcgtgggagctgccacaggcgcccactctcaagttcacctgacacagtctggccccgaagtgcggaagcctggcacaagcgtgaaggtgtcctgtaaagcccctggcaacaccctgaaaacctacgacctgcactgggtccgatctgtgcctggacaaggactgcagtggatgggctggattagccacgagggcgacaagaaagtgatcgtggaacggttcaaggccaaagtgaccatcgactgggacagaagcaccaacaccgcctacctgcagctgagcggactgacatctggcgataccgccgtgtactactgtgccaagggcagcaagcaccggctgagagattacgccctgtacgacgatgacggcgccctgaattgggccgtcgatgtggactacctgagcaacctggaattctggggccagggaacagccgtgacagtgtctagtgcttccacaaagggccctagcgtgttccctctggctcctagcagcaagtctacaagcggaggaacagctgccctgggctgcctggtggaagattactttcctgagcctgtgaccgtgtcctggaacagcggtgctctgacttctggcgtgcacacctttccagccgtgctgcaaagcagcggcctgtactctctgagcagcgtggtcacagtgccaagctctagcctgggcacccagacctacatctgcaatgtgaaccacaagcctagcaacaccaaggtggacgacagagtggaacccaagagctgcgacaagacccacacctgtcctccatgtcctgctccagaactgctcggcggaccttccgtgttcctgtttcctccaaagcctaaggacaccctgatgatcagcagaacccctgaagtgacctgcgtggtggtggatgtgtctcacgaggaccccgaagtgaagttcaattggtacgtggacggcgtggaagtgcacaacgccaagaccaagcctagagaggaacagtacaacagcacctacagagtggtgtccgtgctgacagtgctgcaccaggattggctgaacggcaaagagtacaagtgcaaggtgtccaacaaggccctgcctgctcctatcgagaaaaccatcagcaaggccaagggccagcctagggaaccccaggtttacacactgcctccaagccgcgaggaaatgaccaagaaccaggtgtccctgacctgcctcgtgaagggcttctacccttccgatatcgccgtggaatgggagagcaatggccagcctgagaacaactacaagacaacccctcctgtgctggacagcgacggctcattcttcctgtacagcaagctgaccgtggacaagtccagatggcagcagggcaacgtgttcagctgtagcgtgctgcacgaagccctgcacagccactacacccagaaaagcctgtctctgagccccggcaaatgataaggatccgatctggtactgcatgcacgcaatgctagctgcccctttcccgtcctgggtaccccgagtctcccccgacctcgggtcccaggtatgctcccacctccacctgccccactcaccacctctgctagttccagacacctcccaagcacgcagcaatgcagctcaaaacgcttagcctagccacacccccacgggaaacagcagtgattaacctttagcaataaacgaaagtttaactaagctatactaaccccagggttggtcaatttcgtgccagccacaccctcgagctagcaaaaaaaaaaaaaaaaaaaaaaaaaaaaaagcatatgactaaaaaaaaaaaaaaaaaaaaaaaaaaaaaaaaaaaaaaaaaaaaaaaaaaaaaaaaaaaaaaaaaaaaaa

SEQ ID NO: 951 - RNA, 1937 nt, synthetic construct
  source 1..1937: mol_type = other RNA
agaataaactagtattcttctggtccccacagactcagagagaacccgccaccatggattggatctggcgcatcctgtttctcgtgggagctgccacaggcgcccactctcaagttcacctgacacagtctggccccgaagtgcggaagcctggcacaagcgtgaaggtgtcctgtaaagcccctggcaacaccctgaaaacctacgacctgcactgggtccgatctgtgcctggacaaggactgcagtggatgggctggattagccacgagggcgacaagaaagtgatcgtggaacggttcaaggccaaagtgaccatcgactgggacagaagcaccaacaccgcctacctgcagctgagcggactgacatctggcgataccgccgtgtactactgtgccaagggcagcaagcaccggctgagagattacgccctgtacgacgatgacggcgccctgaattgggccgtcgatgtggactacctgagcaacctggaattctggggccagggaacagccgtgacagtgtctagtgcttccacaaagggccctagcgtgttccctctggctcctagcagcaagtctacaagcggaggaacagctgccctgggctgcctggtggaagattactttcctgagcctgtgaccgtgtcctggaacagcggtgctctgacttctggcgtgcacacctttccagccgtgctgcaaagcagcggcctgtactctctgagcagcgtggtcacagtgccaagctctagcctgggcacccagacctacatctgcaatgtgaaccacaagcctagcaacaccaaggtggacgacagagtggaacccaagagctgcgacaagacccacacctgtcctccatgtcctgctccagaactgctggccggaccttccgtgttcctgtttcctccaaagcctaaggacaccctgatgatcagcagaacccctgaagtgacctgcgtggtggtggatgtgtctcacgaggaccccgaagtgaagttcaattggtacgtggacggcgtggaagtgcacaatgccaagaccaagcctagagaggaacagtacaacagcacctacagagtggtgtccgtgctgaccgtgctgcaccaggattggctgaacggcaaagagtacaagtgcaaggtgtccaacaaggccctgcctctgcctgaggaaaagaccatcagcaaggccaagggccagcctagggaaccccaggtttacacactgcctccaagccgcgaggaaatgaccaagaaccaggtgtccctgacctgcctcgtgaagggcttctacccttccgatatcgccgtggaatgggagagcaatggccagcctgagaacaactacaagacaacccctcctgtgctggacagcgacggctcattcttcctgtacagcaagctgaccgtggacaagtccagatggcagcagggcaacgtgttcagctgtagcgtgctgcacgaagccctgcacagccactacacccagaaaagcctgtctctgagccccggcaaatgataaggatccgatctggtactgcatgcacgcaatgctagctgcccctttcccgtcctgggtaccccgagtctcccccgacctcgggtcccaggtatgctcccacctccacctgccccactcaccacctctgctagttccagacacctcccaagcacgcagcaatgcagctcaaaacgcttagcctagccacacccccacgggaaacagcagtgattaacctttagcaataaacgaaagtttaactaagctatactaaccccagggttggtcaatttcgtgccagccacaccctcgagctagcaaaaaaaaaaaaaaaaaaaaaaaaaaaaaagcatatgactaaaaaaaaaaaaaaaaaaaaaaaaaaaaaaaaaaaaaaaaaaaaaaaaaaaaaaaaaaaaaaaaaaaaaa

SEQ ID NO: 952 - RNA, 1937 nt, synthetic construct
  source 1..1937: mol_type = other RNA
agaataaactagtattcttctggtccccacagactcagagagaacccgccaccatggattggatctggcgcatcctgtttctcgtgggagctgccacaggcgcccactctcaagttcacctgacacagtctggccccgaagtgcggaagcctggcacaagcgtgaaggtgtcctgtaaagcccctggcaacaccctgaaaacctacgacctgcactgggtccgatctgtgcctggacaaggactgcagtggatgggctggattagccacgagggcgacaagaaagtgatcgtggaacggttcaaggccaaagtgaccatcgactgggacagaagcaccaacaccgcctacctgcagctgagcggactgacatctggcgataccgccgtgtactactgtgccaagggcagcaagcaccggctgagagattacgccctgtacgacgatgacggcgccctgaattgggccgtcgatgtggactacctgagcaacctggaattctggggccagggaacagccgtgacagtgtctagtgcttccacaaagggccctagcgtgttccctctggctcctagcagcaagtctacaagcggaggaacagctgccctgggctgcctggtggaagattactttcctgagcctgtgaccgtgtcctggaacagcggtgctctgacttctggcgtgcacacctttccagccgtgctgcaaagcagcggcctgtactctctgagcagcgtggtcacagtgccaagctctagcctgggcacccagacctacatctgcaatgtgaaccacaagcctagcaacaccaaggtggacgacagagtggaacccaagagctgcgacaagacccacacctgtcctccatgtcctgctccagaactgctggccggaccttccgtgttcctgtttcctccaaagcctaaggacaccctgatgatcagcagaacccctgaagtgacctgcgtggtggtggatgtgtctcacgaggaccctgaagtgaagttcaattggtacgtggacggcgtggaagtgcacaacgccaagaccaagcctagagaggaacagtacaacagcacctacagagtggtgtccgtgctgaccgtgctgcaccaggattggctgaacggcaaagagtacaagtgcaaggtgtccaacaaggccctgcctgcccctgaggaaaagaccatcagcaaggccaagggccagcctagggaaccccaggtttacacactgcctccaagccgcgaggaaatgaccaagaaccaggtgtccctgacctgcctcgtgaagggcttctacccttccgatatcgccgtggaatgggagagcaatggccagcctgagaacaactacaagacaacccctcctgtgctggacagcgacggctcattcttcctgtacagcaagctgaccgtggacaagtccagatggcagcagggcaacgtgttcagctgtagcgtgctgcacgaagccctgcacagccactacacccagaaaagcctgtctctgagccccggcaaatgataaggatccgatctggtactgcatgcacgcaatgctagctgcccctttcccgtcctgggtaccccgagtctcccccgacctcgggtcccaggtatgctcccacctccacctgccccactcaccacctctgctagttccagacacctcccaagcacgcagcaatgcagctcaaaacgcttagcctagccacacccccacgggaaacagcagtgattaacctttagcaataaacgaaagtttaactaagctatactaaccccagggttggtcaatttcgtgccagccacaccctcgagctagcaaaaaaaaaaaaaaaaaaaaaaaaaaaaaagcatatgactaaaaaaaaaaaaaaaaaaaaaaaaaaaaaaaaaaaaaaaaaaaaaaaaaaaaaaaaaaaaaaaaaaaaaa

SEQ ID NO: 953 - RNA, 1937 nt, synthetic construct
  source 1..1937: mol_type = other RNA
agaataaactagtattcttctggtccccacagactcagagagaacccgccaccatggattggatctggcgcatcctgtttctcgtgggagctgccacaggcgcccactctcaagttcacctgacacagtctggccccgaagtgcggaagcctggcacaagcgtgaaggtgtcctgtaaagcccctggcaacaccctgaaaacctacgacctgcactgggtccgatctgtgcctggacaaggactgcagtggatgggctggattagccacgagggcgacaagaaagtgatcgtggaacggttcaaggccaaagtgaccatcgactgggacagaagcaccaacaccgcctacctgcagctgagcggactgacatctggcgataccgccgtgtactactgtgccaagggcagcaagcaccggctgagagattacgccctgtacgacgatgacggcgccctgaattgggccgtcgatgtggactacctgagcaacctggaattctggggccagggaacagccgtgacagtgtctagtgcttccacaaagggccctagcgtgttccctctggctcctagcagcaagtctacaagcggaggaacagctgccctgggctgcctggtggaagattactttcctgagcctgtgaccgtgtcctggaacagcggtgctctgacttctggcgtgcacacctttccagccgtgctgcaaagcagcggcctgtactctctgagcagcgtggtcacagtgccaagctctagcctgggcacccagacctacatctgcaatgtgaaccacaagcctagcaacaccaaggtggacgacagagtggaacccaagagctgcgacaagacccacacctgtcctccatgtcctgctccagaactgctggccggaccttccgtgttcctgtttcctccaaagcctaaggacaccctgatgatcagcagaacccctgaagtgacctgcgtggtggtggatgtgtctcacgaggaccctgaagtgaagttcaattggtacgtggacggcgtggaagtgcacaacgccaagaccaagcctagagaggaacagtacaacagcacctacagagtggtgtccgtgctgaccgtgctgcaccaggattggctgaacggcaaagagtacaagtgcaaggtgtccaacaaggccctgcctgcccctatcgaaaagaccatcagcaaggccaagggccagcctagggaaccccaggtttacacactgcctccaagccgcgaggaaatgaccaagaaccaggtgtccctgacctgcctcgtgaagggcttctacccttccgatatcgccgtggaatgggagagcaatggccagcctgagaacaactacaagacaacccctcctgtgctggacagcgacggctcattcttcctgtacagcaagctgaccgtggacaagtccagatggcagcagggcaacgtgttcagctgtagcgtgctgcacgaagccctgcacagccactacacccagaaaagcctgtctctgagccccggcaaatgataaggatccgatctggtactgcatgcacgcaatgctagctgcccctttcccgtcctgggtaccccgagtctcccccgacctcgggtcccaggtatgctcccacctccacctgccccactcaccacctctgctagttccagacacctcccaagcacgcagcaatgcagctcaaaacgcttagcctagccacacccccacgggaaacagcagtgattaacctttagcaataaacgaaagtttaactaagctatactaaccccagggttggtcaatttcgtgccagccacaccctcgagctagcaaaaaaaaaaaaaaaaaaaaaaaaaaaaaagcatatgactaaaaaaaaaaaaaaaaaaaaaaaaaaaaaaaaaaaaaaaaaaaaaaaaaaaaaaaaaaaaaaaaaaaaaa

SEQ ID NO: 954 - RNA, 1937 nt, synthetic construct
  source 1..1937: mol_type = other RNA
agaataaactagtattcttctggtccccacagactcagagagaacccgccaccatggattggatctggcgcatcctgtttctcgtgggagctgccacaggcgcccactctcaagttcacctgacacagtctggccccgaagtgcggaagcctggcacaagcgtgaaggtgtcctgtaaagcccctggcaacaccctgaaaacctacgacctgcactgggtccgatctgtgcctggacaaggactgcagtggatgggctggattagccacgagggcgacaagaaagtgatcgtggaacggttcaaggccaaagtgaccatcgactgggacagaagcaccaacaccgcctacctgcagctgagcggactgacatctggcgataccgccgtgtactactgtgccaagggcagcaagcaccggctgagagattacgccctgtacgacgatgacggcgccctgaattgggccgtcgatgtggactacctgagcaacctggaattctggggccagggaacagccgtgacagtgtctagtgcttccacaaagggccctagcgtgttccctctggctcctagcagcaagtctacaagcggaggaacagctgccctgggctgcctggtggaagattactttcctgagcctgtgaccgtgtcctggaacagcggtgctctgacttctggcgtgcacacctttccagccgtgctgcaaagcagcggcctgtactctctgagcagcgtggtcacagtgccaagctctagcctgggcacccagacctacatctgcaatgtgaaccacaagcctagcaacaccaaggtggacgacagagtggaacccaagagctgcgacaagacccacacctgtcctccatgtcctgctccagaactgctgggcggaccttccgtgttcctgtttcctccaaagcctaaggacaccctgatgatcagcagaacccctgaagtgacctgcgtggtggtggatgtgtctcacgaggaccctgaagtgaagttcaattggtacgtggacggcgtggaagtgcacaacgccaagaccaagcctagagaggaacagtacaacagcacctacagagtggtgtccgtgctgaccgtgctgcaccaggattggctgaacggcaaagagtacaagtgcaaggtgtccaacaaggccctgcctgcccctgaggaaaagaccatcagcaaggccaagggccagcctagggaaccccaggtttacacactgcctccaagccgcgaggaaatgaccaagaaccaggtgtccctgacctgcctcgtgaagggcttctacccttccgatatcgccgtggaatgggagagcaatggccagcctgagaacaactacaagacaacccctcctgtgctggacagcgacggctcattcttcctgtacagcaagctgaccgtggacaagtccagatggcagcagggcaacgtgttcagctgtagcgtgctgcacgaagccctgcacagccactacacccagaaaagcctgtctctgagccccggcaaatgataaggatccgatctggtactgcatgcacgcaatgctagctgcccctttcccgtcctgggtaccccgagtctcccccgacctcgggtcccaggtatgctcccacctccacctgccccactcaccacctctgctagttccagacacctcccaagcacgcagcaatgcagctcaaaacgcttagcctagccacacccccacgggaaacagcagtgattaacctttagcaataaacgaaagtttaactaagctatactaaccccagggttggtcaatttcgtgccagccacaccctcgagctagcaaaaaaaaaaaaaaaaaaaaaaaaaaaaaagcatatgactaaaaaaaaaaaaaaaaaaaaaaaaaaaaaaaaaaaaaaaaaaaaaaaaaaaaaaaaaaaaaaaaaaaaaa

SEQ ID NO: 955 - RNA, 1937 nt, synthetic construct
  source 1..1937: mol_type = other RNA
agaataaactagtattcttctggtccccacagactcagagagaacccgccaccatggattggatctggcgcatcctgtttctcgtgggagctgccacaggcgcccactctcaagttcacctgacacagtctggccccgaagtgcggaagcctggcacaagcgtgaaggtgtcctgtaaagcccctggcaacaccctgaaaacctacgacctgcactgggtccgatctgtgcctggacaaggactgcagtggatgggctggattagccacgagggcgacaagaaagtgatcgtggaacggttcaaggccaaagtgaccatcgactgggacagaagcaccaacaccgcctacctgcagctgagcggactgacatctggcgataccgccgtgtactactgtgccaagggcagcaagcaccggctgagagattacgccctgtacgacgatgacggcgccctgaattgggccgtcgatgtggactacctgagcaacctggaattctggggccagggaacagccgtgacagtgtctagtgcttccacaaagggccctagcgtgttccctctggctcctagcagcaagtctacaagcggaggaacagctgccctgggctgcctggtggaagattactttcctgagcctgtgaccgtgtcctggaacagcggtgctctgacttctggcgtgcacacctttccagccgtgctgcaaagcagcggcctgtactctctgagcagcgtggtcacagtgccaagctctagcctgggcacccagacctacatctgcaatgtgaaccacaagcctagcaacaccaaggtggacgacagagtggaacccaagagctgcgacaagacccacacctgtcctccatgtcctgctccagaactgctcggcggaccttccgtgttcctgtttcctccaaagcctaaggacaccctgatgatcagcagaacccctgaagtgacctgcgtggtggtggatgtgtctcacgaggaccccgaagtgaagttcaattggtacgtggacggcgtggaagtgcacaacgccaagaccaagcctagagaggaacagtacaacagcacctacagagtggtgtccgtgctgacagtgctgcaccaggattggctgaacggcaaagagtacaagtgcaaggtgtccaacaaggccctgcctgctcctatcgagaaaaccatcagcaaggccaagggccagcctagggaaccccaagtctgtacactgcctcctagccgcgaggaaatgaccaagaaccaggtgtccctgagctgcgccgtgaagggcttttacccttccgatatcgccgtggaatgggagagcaatggccagcctgagaacaactacaagacaacccctcctgtgctggacagcgacggctcattcttcctggtgtccaagctgacagtggacaagagcagatggcagcagggcaacgtgttcagctgctctgtgctgcacgaagccctgcacagccactacacccagaagtccctgtctctgagccccggcaagtgataaggatccgatctggtactgcatgcacgcaatgctagctgcccctttcccgtcctgggtaccccgagtctcccccgacctcgggtcccaggtatgctcccacctccacctgccccactcaccacctctgctagttccagacacctcccaagcacgcagcaatgcagctcaaaacgcttagcctagccacacccccacgggaaacagcagtgattaacctttagcaataaacgaaagtttaactaagctatactaaccccagggttggtcaatttcgtgccagccacaccctcgagctagcaaaaaaaaaaaaaaaaaaaaaaaaaaaaaagcatatgactaaaaaaaaaaaaaaaaaaaaaaaaaaaaaaaaaaaaaaaaaaaaaaaaaaaaaaaaaaaaaaaaaaaaaa

SEQ ID NO: 956 - RNA, 1937 nt, synthetic construct
  source 1..1937: mol_type = other RNA
agaataaactagtattcttctggtccccacagactcagagagaacccgccaccatggattggatctggcgcatcctgtttctcgtgggagctgccacaggcgcccactctcaagttcacctgacacagtctggccccgaagtgcggaagcctggcacaagcgtgaaggtgtcctgtaaagcccctggcaacaccctgaaaacctacgacctgcactgggtccgatctgtgcctggacaaggactgcagtggatgggctggattagccacgagggcgacaagaaagtgatcgtggaacggttcaaggccaaagtgaccatcgactgggacagaagcaccaacaccgcctacctgcagctgagcggactgacatctggcgataccgccgtgtactactgtgccaagggcagcaagcaccggctgagagattacgccctgtacgacgatgacggcgccctgaattgggccgtcgatgtggactacctgagcaacctggaattctggggccagggaacagccgtgacagtgtctagtgcttccacaaagggccctagcgtgttccctctggctcctagcagcaagtctacaagcggaggaacagctgccctgggctgcctggtggaagattactttcctgagcctgtgaccgtgtcctggaacagcggtgctctgacttctggcgtgcacacctttccagccgtgctgcaaagcagcggcctgtactctctgagcagcgtggtcacagtgccaagctctagcctgggcacccagacctacatctgcaatgtgaaccacaagcctagcaacaccaaggtggacgacagagtggaacccaagagctgcgacaagacccacacctgtcctccatgtcctgctccagaactgctggccggaccttccgtgttcctgtttcctccaaagcctaaggacaccctgatgatcagcagaacccctgaagtgacctgcgtggtggtggatgtgtctcacgaggaccccgaagtgaagttcaattggtacgtggacggcgtggaagtgcacaatgccaagaccaagcctagagaggaacagtacaacagcacctacagagtggtgtccgtgctgaccgtgctgcaccaggattggctgaacggcaaagagtacaagtgcaaggtgtccaacaaggccctgcctctgcctgaggaaaagaccatcagcaaggccaagggccagcctagggaaccccaagtctgtacactgcctcctagccgcgaggaaatgaccaagaaccaggtgtccctgagctgcgccgtgaagggcttttacccttccgatatcgccgtggaatgggagagcaatggccagcctgagaacaactacaagacaacccctcctgtgctggacagcgacggctcattcttcctggtgtccaagctgacagtggacaagagcagatggcagcagggcaacgtgttcagctgctctgtgctgcacgaagccctgcacagccactacacccagaagtccctgtctctgagccccggcaagtgataaggatccgatctggtactgcatgcacgcaatgctagctgcccctttcccgtcctgggtaccccgagtctcccccgacctcgggtcccaggtatgctcccacctccacctgccccactcaccacctctgctagttccagacacctcccaagcacgcagcaatgcagctcaaaacgcttagcctagccacacccccacgggaaacagcagtgattaacctttagcaataaacgaaagtttaactaagctatactaaccccagggttggtcaatttcgtgccagccacaccctcgagctagcaaaaaaaaaaaaaaaaaaaaaaaaaaaaaagcatatgactaaaaaaaaaaaaaaaaaaaaaaaaaaaaaaaaaaaaaaaaaaaaaaaaaaaaaaaaaaaaaaaaaaaaaa

SEQ ID NO: 957 - RNA, 1937 nt, synthetic construct
  source 1..1937: mol_type = other RNA
agaataaactagtattcttctggtccccacagactcagagagaacccgccaccatggattggatctggcgcatcctgtttctcgtgggagctgccacaggcgcccactctcaagttcacctgacacagtctggccccgaagtgcggaagcctggcacaagcgtgaaggtgtcctgtaaagcccctggcaacaccctgaaaacctacgacctgcactgggtccgatctgtgcctggacaaggactgcagtggatgggctggattagccacgagggcgacaagaaagtgatcgtggaacggttcaaggccaaagtgaccatcgactgggacagaagcaccaacaccgcctacctgcagctgagcggactgacatctggcgataccgccgtgtactactgtgccaagggcagcaagcaccggctgagagattacgccctgtacgacgatgacggcgccctgaattgggccgtcgatgtggactacctgagcaacctggaattctggggccagggaacagccgtgacagtgtctagtgcttccacaaagggccctagcgtgttccctctggctcctagcagcaagtctacaagcggaggaacagctgccctgggctgcctggtggaagattactttcctgagcctgtgaccgtgtcctggaacagcggtgctctgacttctggcgtgcacacctttccagccgtgctgcaaagcagcggcctgtactctctgagcagcgtggtcacagtgccaagctctagcctgggcacccagacctacatctgcaatgtgaaccacaagcctagcaacaccaaggtggacgacagagtggaacccaagagctgcgacaagacccacacctgtcctccatgtcctgctccagaactgctggccggaccttccgtgttcctgtttcctccaaagcctaaggacaccctgatgatcagcagaacccctgaagtgacctgcgtggtggtggatgtgtctcacgaggaccctgaagtgaagttcaattggtacgtggacggcgtggaagtgcacaacgccaagaccaagcctagagaggaacagtacaacagcacctacagagtggtgtccgtgctgaccgtgctgcaccaggattggctgaacggcaaagagtacaagtgcaaggtgtccaacaaggccctgcctgcccctgaggaaaagaccatcagcaaggccaagggccagcctagggaaccccaagtctgtacactgcctcctagccgcgaggaaatgaccaagaaccaggtgtccctgagctgcgccgtgaagggcttttacccttccgatatcgccgtggaatgggagagcaatggccagcctgagaacaactacaagacaacccctcctgtgctggacagcgacggctcattcttcctggtgtccaagctgacagtggacaagagcagatggcagcagggcaacgtgttcagctgctctgtgctgcacgaagccctgcacagccactacacccagaagtccctgtctctgagccccggcaagtgataaggatccgatctggtactgcatgcacgcaatgctagctgcccctttcccgtcctgggtaccccgagtctcccccgacctcgggtcccaggtatgctcccacctccacctgccccactcaccacctctgctagttccagacacctcccaagcacgcagcaatgcagctcaaaacgcttagcctagccacacccccacgggaaacagcagtgattaacctttagcaataaacgaaagtttaactaagctatactaaccccagggttggtcaatttcgtgccagccacaccctcgagctagcaaaaaaaaaaaaaaaaaaaaaaaaaaaaaagcatatgactaaaaaaaaaaaaaaaaaaaaaaaaaaaaaaaaaaaaaaaaaaaaaaaaaaaaaaaaaaaaaaaaaaaaaa

SEQ ID NO: 958 - RNA, 1937 nt, synthetic construct
  source 1..1937: mol_type = other RNA
agaataaactagtattcttctggtccccacagactcagagagaacccgccaccatggattggatctggcgcatcctgtttctcgtgggagctgccacaggcgcccactctcaagttcacctgacacagtctggccccgaagtgcggaagcctggcacaagcgtgaaggtgtcctgtaaagcccctggcaacaccctgaaaacctacgacctgcactgggtccgatctgtgcctggacaaggactgcagtggatgggctggattagccacgagggcgacaagaaagtgatcgtggaacggttcaaggccaaagtgaccatcgactgggacagaagcaccaacaccgcctacctgcagctgagcggactgacatctggcgataccgccgtgtactactgtgccaagggcagcaagcaccggctgagagattacgccctgtacgacgatgacggcgccctgaattgggccgtcgatgtggactacctgagcaacctggaattctggggccagggaacagccgtgacagtgtctagtgcttccacaaagggccctagcgtgttccctctggctcctagcagcaagtctacaagcggaggaacagctgccctgggctgcctggtggaagattactttcctgagcctgtgaccgtgtcctggaacagcggtgctctgacttctggcgtgcacacctttccagccgtgctgcaaagcagcggcctgtactctctgagcagcgtggtcacagtgccaagctctagcctgggcacccagacctacatctgcaatgtgaaccacaagcctagcaacaccaaggtggacgacagagtggaacccaagagctgcgacaagacccacacctgtcctccatgtcctgctccagaactgctggccggaccttccgtgttcctgtttcctccaaagcctaaggacaccctgatgatcagcagaacccctgaagtgacctgcgtggtggtggatgtgtctcacgaggaccctgaagtgaagttcaattggtacgtggacggcgtggaagtgcacaacgccaagaccaagcctagagaggaacagtacaacagcacctacagagtggtgtccgtgctgaccgtgctgcaccaggattggctgaacggcaaagagtacaagtgcaaggtgtccaacaaggccctgcctgcccctatcgaaaagaccatcagcaaggccaagggccagcctagggaaccccaagtctgtacactgcctcctagccgcgaggaaatgaccaagaaccaggtgtccctgagctgcgccgtgaagggcttttacccttccgatatcgccgtggaatgggagagcaatggccagcctgagaacaactacaagacaacccctcctgtgctggacagcgacggctcattcttcctggtgtccaagctgacagtggacaagagcagatggcagcagggcaacgtgttcagctgctctgtgctgcacgaagccctgcacagccactacacccagaagtccctgtctctgagccccggcaagtgataaggatccgatctggtactgcatgcacgcaatgctagctgcccctttcccgtcctgggtaccccgagtctcccccgacctcgggtcccaggtatgctcccacctccacctgccccactcaccacctctgctagttccagacacctcccaagcacgcagcaatgcagctcaaaacgcttagcctagccacacccccacgggaaacagcagtgattaacctttagcaataaacgaaagtttaactaagctatactaaccccagggttggtcaatttcgtgccagccacaccctcgagctagcaaaaaaaaaaaaaaaaaaaaaaaaaaaaaagcatatgactaaaaaaaaaaaaaaaaaaaaaaaaaaaaaaaaaaaaaaaaaaaaaaaaaaaaaaaaaaaaaaaaaaaaaa

SEQ ID NO: 959 - RNA, 1937 nt, synthetic construct
  source 1..1937: mol_type = other RNA
agaataaactagtattcttctggtccccacagactcagagagaacccgccaccatggattggatctggcgcatcctgtttctcgtgggagctgccacaggcgcccactctcaagttcacctgacacagtctggccccgaagtgcggaagcctggcacaagcgtgaaggtgtcctgtaaagcccctggcaacaccctgaaaacctacgacctgcactgggtccgatctgtgcctggacaaggactgcagtggatgggctggattagccacgagggcgacaagaaagtgatcgtggaacggttcaaggccaaagtgaccatcgactgggacagaagcaccaacaccgcctacctgcagctgagcggactgacatctggcgataccgccgtgtactactgtgccaagggcagcaagcaccggctgagagattacgccctgtacgacgatgacggcgccctgaattgggccgtcgatgtggactacctgagcaacctggaattctggggccagggaacagccgtgacagtgtctagtgcttccacaaagggccctagcgtgttccctctggctcctagcagcaagtctacaagcggaggaacagctgccctgggctgcctggtggaagattactttcctgagcctgtgaccgtgtcctggaacagcggtgctctgacttctggcgtgcacacctttccagccgtgctgcaaagcagcggcctgtactctctgagcagcgtggtcacagtgccaagctctagcctgggcacccagacctacatctgcaatgtgaaccacaagcctagcaacaccaaggtggacgacagagtggaacccaagagctgcgacaagacccacacctgtcctccatgtcctgctccagaactgctgggcggaccttccgtgttcctgtttcctccaaagcctaaggacaccctgatgatcagcagaacccctgaagtgacctgcgtggtggtggatgtgtctcacgaggaccctgaagtgaagttcaattggtacgtggacggcgtggaagtgcacaacgccaagaccaagcctagagaggaacagtacaacagcacctacagagtggtgtccgtgctgaccgtgctgcaccaggattggctgaacggcaaagagtacaagtgcaaggtgtccaacaaggccctgcctgcccctgaggaaaagaccatcagcaaggccaagggccagcctagggaaccccaagtctgtacactgcctcctagccgcgaggaaatgaccaagaaccaggtgtccctgagctgcgccgtgaagggcttttacccttccgatatcgccgtggaatgggagagcaatggccagcctgagaacaactacaagacaacccctcctgtgctggacagcgacggctcattcttcctggtgtccaagctgacagtggacaagagcagatggcagcagggcaacgtgttcagctgctctgtgctgcacgaagccctgcacagccactacacccagaagtccctgtctctgagccccggcaagtgataaggatccgatctggtactgcatgcacgcaatgctagctgcccctttcccgtcctgggtaccccgagtctcccccgacctcgggtcccaggtatgctcccacctccacctgccccactcaccacctctgctagttccagacacctcccaagcacgcagcaatgcagctcaaaacgcttagcctagccacacccccacgggaaacagcagtgattaacctttagcaataaacgaaagtttaactaagctatactaaccccagggttggtcaatttcgtgccagccacaccctcgagctagcaaaaaaaaaaaaaaaaaaaaaaaaaaaaaagcatatgactaaaaaaaaaaaaaaaaaaaaaaaaaaaaaaaaaaaaaaaaaaaaaaaaaaaaaaaaaaaaaaaaaaaaaa

SEQ ID NO: 960 - RNA, 1937 nt, synthetic construct
  source 1..1937: mol_type = other RNA
agaataaactagtattcttctggtccccacagactcagagagaacccgccaccatggattggatctggcgcatcctgtttctcgtgggagctgccacaggcgcccactctcaagttcacctgacacagtctggccccgaagtgcggaagcctggcacaagcgtgaaggtgtcctgtaaagcccctggcaacaccctgaaaacctacgacctgcactgggtccgatctgtgcctggacaaggactgcagtggatgggctggattagccacgagggcgacaagaaagtgatcgtggaacggttcaaggccaaagtgaccatcgactgggacagaagcaccaacaccgcctacctgcagctgagcggactgacatctggcgataccgccgtgtactactgtgccaagggcagcaagcaccggctgagagattacgccctgtacgacgatgacggcgccctgaattgggccgtcgatgtggactacctgagcaacctggaattctggggccagggaacagccgtgacagtgtctagtgcttccacaaagggccctagcgtgttccctctggctcctagcagcaagtctacaagcggaggaacagctgccctgggctgcctggtggaagattactttcctgagcctgtgaccgtgtcctggaacagcggtgctctgacttctggcgtgcacacctttccagccgtgctgcaaagcagcggcctgtactctctgagcagcgtggtcacagtgccaagctctagcctgggcacccagacctacatctgcaatgtgaaccacaagcctagcaacaccaaggtggacgacagagtggaacccaagagctgcgacaagacccacacctgtcctccatgtcctgctccagaactgctcggcggaccttccgtgttcctgtttcctccaaagcctaaggacaccctgatgatcagcagaacccctgaagtgacctgcgtggtggtggatgtgtctcacgaggaccccgaagtgaagttcaattggtacgtggacggcgtggaagtgcacaacgccaagaccaagcctagagaggaacagtacaacagcacctacagagtggtgtccgtgctgacagtgctgcaccaggattggctgaacggcaaagagtacaagtgcaaggtgtccaacaaggccctgcctgctcctatcgagaaaaccatcagcaaggccaagggccagcctagggaaccccaggtttacaccctgcctccatgccgcgaggaaatgaccaagaaccaggtgtccctgtggtgcctcgtgaagggcttctacccttccgatatcgccgtggaatgggagagcaatggccagcctgagaacaactacaagacaacccctcctgtgctggacagcgacggctcattcttcctgtacagcaagctgaccgtggacaagtccagatggcagcagggcaacgtgttcagctgtagcgtgctgcacgaagccctgcacagccactacacccagaagtccctgtctctgagccccggcaagtgataaggatccgatctggtactgcatgcacgcaatgctagctgcccctttcccgtcctgggtaccccgagtctcccccgacctcgggtcccaggtatgctcccacctccacctgccccactcaccacctctgctagttccagacacctcccaagcacgcagcaatgcagctcaaaacgcttagcctagccacacccccacgggaaacagcagtgattaacctttagcaataaacgaaagtttaactaagctatactaaccccagggttggtcaatttcgtgccagccacaccctcgagctagcaaaaaaaaaaaaaaaaaaaaaaaaaaaaaagcatatgactaaaaaaaaaaaaaaaaaaaaaaaaaaaaaaaaaaaaaaaaaaaaaaaaaaaaaaaaaaaaaaaaaaaaaa

SEQ ID NO: 961 - RNA, 1937 nt, synthetic construct
  source 1..1937: mol_type = other RNA
agaataaactagtattcttctggtccccacagactcagagagaacccgccaccatggattggatctggcgcatcctgtttctcgtgggagctgccacaggcgcccactctcaagttcacctgacacagtctggccccgaagtgcggaagcctggcacaagcgtgaaggtgtcctgtaaagcccctggcaacaccctgaaaacctacgacctgcactgggtccgatctgtgcctggacaaggactgcagtggatgggctggattagccacgagggcgacaagaaagtgatcgtggaacggttcaaggccaaagtgaccatcgactgggacagaagcaccaacaccgcctacctgcagctgagcggactgacatctggcgataccgccgtgtactactgtgccaagggcagcaagcaccggctgagagattacgccctgtacgacgatgacggcgccctgaattgggccgtcgatgtggactacctgagcaacctggaattctggggccagggaacagccgtgacagtgtctagtgcttccacaaagggccctagcgtgttccctctggctcctagcagcaagtctacaagcggaggaacagctgccctgggctgcctggtggaagattactttcctgagcctgtgaccgtgtcctggaacagcggtgctctgacttctggcgtgcacacctttccagccgtgctgcaaagcagcggcctgtactctctgagcagcgtggtcacagtgccaagctctagcctgggcacccagacctacatctgcaatgtgaaccacaagcctagcaacaccaaggtggacgacagagtggaacccaagagctgcgacaagacccacacctgtcctccatgtcctgctccagaactgctggccggaccttccgtgttcctgtttcctccaaagcctaaggacaccctgatgatcagcagaacccctgaagtgacctgcgtggtggtggatgtgtctcacgaggaccccgaagtgaagttcaattggtacgtggacggcgtggaagtgcacaatgccaagaccaagcctagagaggaacagtacaacagcacctacagagtggtgtccgtgctgaccgtgctgcaccaggattggctgaacggcaaagagtacaagtgcaaggtgtccaacaaggccctgcctctgcctgaggaaaagaccatcagcaaggccaagggccagcctagggaaccccaggtttacaccctgcctccatgccgcgaggaaatgaccaagaaccaggtgtccctgtggtgcctcgtgaagggcttctacccttccgatatcgccgtggaatgggagagcaatggccagcctgagaacaactacaagacaacccctcctgtgctggacagcgacggctcattcttcctgtacagcaagctgaccgtggacaagtccagatggcagcagggcaacgtgttcagctgtagcgtgctgcacgaagccctgcacagccactacacccagaagtccctgtctctgagccccggcaagtgataaggatccgatctggtactgcatgcacgcaatgctagctgcccctttcccgtcctgggtaccccgagtctcccccgacctcgggtcccaggtatgctcccacctccacctgccccactcaccacctctgctagttccagacacctcccaagcacgcagcaatgcagctcaaaacgcttagcctagccacacccccacgggaaacagcagtgattaacctttagcaataaacgaaagtttaactaagctatactaaccccagggttggtcaatttcgtgccagccacaccctcgagctagcaaaaaaaaaaaaaaaaaaaaaaaaaaaaaagcatatgactaaaaaaaaaaaaaaaaaaaaaaaaaaaaaaaaaaaaaaaaaaaaaaaaaaaaaaaaaaaaaaaaaaaaaa

SEQ ID NO: 962 - RNA, 1937 nt, synthetic construct
  source 1..1937: mol_type = other RNA
agaataaactagtattcttctggtccccacagactcagagagaacccgccaccatggattggatctggcgcatcctgtttctcgtgggagctgccacaggcgcccactctcaagttcacctgacacagtctggccccgaagtgcggaagcctggcacaagcgtgaaggtgtcctgtaaagcccctggcaacaccctgaaaacctacgacctgcactgggtccgatctgtgcctggacaaggactgcagtggatgggctggattagccacgagggcgacaagaaagtgatcgtggaacggttcaaggccaaagtgaccatcgactgggacagaagcaccaacaccgcctacctgcagctgagcggactgacatctggcgataccgccgtgtactactgtgccaagggcagcaagcaccggctgagagattacgccctgtacgacgatgacggcgccctgaattgggccgtcgatgtggactacctgagcaacctggaattctggggccagggaacagccgtgacagtgtctagtgcttccacaaagggccctagcgtgttccctctggctcctagcagcaagtctacaagcggaggaacagctgccctgggctgcctggtggaagattactttcctgagcctgtgaccgtgtcctggaacagcggtgctctgacttctggcgtgcacacctttccagccgtgctgcaaagcagcggcctgtactctctgagcagcgtggtcacagtgccaagctctagcctgggcacccagacctacatctgcaatgtgaaccacaagcctagcaacaccaaggtggacgacagagtggaacccaagagctgcgacaagacccacacctgtcctccatgtcctgctccagaactgctggccggaccttccgtgttcctgtttcctccaaagcctaaggacaccctgatgatcagcagaacccctgaagtgacctgcgtggtggtggatgtgtctcacgaggaccctgaagtgaagttcaattggtacgtggacggcgtggaagtgcacaacgccaagaccaagcctagagaggaacagtacaacagcacctacagagtggtgtccgtgctgaccgtgctgcaccaggattggctgaacggcaaagagtacaagtgcaaggtgtccaacaaggccctgcctgcccctgaggaaaagaccatcagcaaggccaagggccagcctagggaaccccaggtttacaccctgcctccatgccgcgaggaaatgaccaagaaccaggtgtccctgtggtgcctcgtgaagggcttctacccttccgatatcgccgtggaatgggagagcaatggccagcctgagaacaactacaagacaacccctcctgtgctggacagcgacggctcattcttcctgtacagcaagctgaccgtggacaagtccagatggcagcagggcaacgtgttcagctgtagcgtgctgcacgaagccctgcacagccactacacccagaagtccctgtctctgagccccggcaagtgataaggatccgatctggtactgcatgcacgcaatgctagctgcccctttcccgtcctgggtaccccgagtctcccccgacctcgggtcccaggtatgctcccacctccacctgccccactcaccacctctgctagttccagacacctcccaagcacgcagcaatgcagctcaaaacgcttagcctagccacacccccacgggaaacagcagtgattaacctttagcaataaacgaaagtttaactaagctatactaaccccagggttggtcaatttcgtgccagccacaccctcgagctagcaaaaaaaaaaaaaaaaaaaaaaaaaaaaaagcatatgactaaaaaaaaaaaaaaaaaaaaaaaaaaaaaaaaaaaaaaaaaaaaaaaaaaaaaaaaaaaaaaaaaaaaaa

SEQ ID NO: 963 - RNA, 1937 nt, synthetic construct
  source 1..1937: mol_type = other RNA
agaataaactagtattcttctggtccccacagactcagagagaacccgccaccatggattggatctggcgcatcctgtttctcgtgggagctgccacaggcgcccactctcaagttcacctgacacagtctggccccgaagtgcggaagcctggcacaagcgtgaaggtgtcctgtaaagcccctggcaacaccctgaaaacctacgacctgcactgggtccgatctgtgcctggacaaggactgcagtggatgggctggattagccacgagggcgacaagaaagtgatcgtggaacggttcaaggccaaagtgaccatcgactgggacagaagcaccaacaccgcctacctgcagctgagcggactgacatctggcgataccgccgtgtactactgtgccaagggcagcaagcaccggctgagagattacgccctgtacgacgatgacggcgccctgaattgggccgtcgatgtggactacctgagcaacctggaattctggggccagggaacagccgtgacagtgtctagtgcttccacaaagggccctagcgtgttccctctggctcctagcagcaagtctacaagcggaggaacagctgccctgggctgcctggtggaagattactttcctgagcctgtgaccgtgtcctggaacagcggtgctctgacttctggcgtgcacacctttccagccgtgctgcaaagcagcggcctgtactctctgagcagcgtggtcacagtgccaagctctagcctgggcacccagacctacatctgcaatgtgaaccacaagcctagcaacaccaaggtggacgacagagtggaacccaagagctgcgacaagacccacacctgtcctccatgtcctgctccagaactgctggccggaccttccgtgttcctgtttcctccaaagcctaaggacaccctgatgatcagcagaacccctgaagtgacctgcgtggtggtggatgtgtctcacgaggaccctgaagtgaagttcaattggtacgtggacggcgtggaagtgcacaacgccaagaccaagcctagagaggaacagtacaacagcacctacagagtggtgtccgtgctgaccgtgctgcaccaggattggctgaacggcaaagagtacaagtgcaaggtgtccaacaaggccctgcctgcccctatcgaaaagaccatcagcaaggccaagggccagcctagggaaccccaggtttacaccctgcctccatgccgcgaggaaatgaccaagaaccaggtgtccctgtggtgcctcgtgaagggcttctacccttccgatatcgccgtggaatgggagagcaatggccagcctgagaacaactacaagacaacccctcctgtgctggacagcgacggctcattcttcctgtacagcaagctgaccgtggacaagtccagatggcagcagggcaacgtgttcagctgtagcgtgctgcacgaagccctgcacagccactacacccagaagtccctgtctctgagccccggcaagtgataaggatccgatctggtactgcatgcacgcaatgctagctgcccctttcccgtcctgggtaccccgagtctcccccgacctcgggtcccaggtatgctcccacctccacctgccccactcaccacctctgctagttccagacacctcccaagcacgcagcaatgcagctcaaaacgcttagcctagccacacccccacgggaaacagcagtgattaacctttagcaataaacgaaagtttaactaagctatactaaccccagggttggtcaatttcgtgccagccacaccctcgagctagcaaaaaaaaaaaaaaaaaaaaaaaaaaaaaagcatatgactaaaaaaaaaaaaaaaaaaaaaaaaaaaaaaaaaaaaaaaaaaaaaaaaaaaaaaaaaaaaaaaaaaaaaa

SEQ ID NO: 964 - RNA, 1937 nt, synthetic construct
  source 1..1937: mol_type = other RNA
agaataaactagtattcttctggtccccacagactcagagagaacccgccaccatggattggatctggcgcatcctgtttctcgtgggagctgccacaggcgcccactctcaagttcacctgacacagtctggccccgaagtgcggaagcctggcacaagcgtgaaggtgtcctgtaaagcccctggcaacaccctgaaaacctacgacctgcactgggtccgatctgtgcctggacaaggactgcagtggatgggctggattagccacgagggcgacaagaaagtgatcgtggaacggttcaaggccaaagtgaccatcgactgggacagaagcaccaacaccgcctacctgcagctgagcggactgacatctggcgataccgccgtgtactactgtgccaagggcagcaagcaccggctgagagattacgccctgtacgacgatgacggcgccctgaattgggccgtcgatgtggactacctgagcaacctggaattctggggccagggaacagccgtgacagtgtctagtgcttccacaaagggccctagcgtgttccctctggctcctagcagcaagtctacaagcggaggaacagctgccctgggctgcctggtggaagattactttcctgagcctgtgaccgtgtcctggaacagcggtgctctgacttctggcgtgcacacctttccagccgtgctgcaaagcagcggcctgtactctctgagcagcgtggtcacagtgccaagctctagcctgggcacccagacctacatctgcaatgtgaaccacaagcctagcaacaccaaggtggacgacagagtggaacccaagagctgcgacaagacccacacctgtcctccatgtcctgctccagaactgctgggcggaccttccgtgttcctgtttcctccaaagcctaaggacaccctgatgatcagcagaacccctgaagtgacctgcgtggtggtggatgtgtctcacgaggaccctgaagtgaagttcaattggtacgtggacggcgtggaagtgcacaacgccaagaccaagcctagagaggaacagtacaacagcacctacagagtggtgtccgtgctgaccgtgctgcaccaggattggctgaacggcaaagagtacaagtgcaaggtgtccaacaaggccctgcctgcccctgaggaaaagaccatcagcaaggccaagggccagcctagggaaccccaggtttacaccctgcctccatgccgcgaggaaatgaccaagaaccaggtgtccctgtggtgcctcgtgaagggcttctacccttccgatatcgccgtggaatgggagagcaatggccagcctgagaacaactacaagacaacccctcctgtgctggacagcgacggctcattcttcctgtacagcaagctgaccgtggacaagtccagatggcagcagggcaacgtgttcagctgtagcgtgctgcacgaagccctgcacagccactacacccagaagtccctgtctctgagccccggcaagtgataaggatccgatctggtactgcatgcacgcaatgctagctgcccctttcccgtcctgggtaccccgagtctcccccgacctcgggtcccaggtatgctcccacctccacctgccccactcaccacctctgctagttccagacacctcccaagcacgcagcaatgcagctcaaaacgcttagcctagccacacccccacgggaaacagcagtgattaacctttagcaataaacgaaagtttaactaagctatactaaccccagggttggtcaatttcgtgccagccacaccctcgagctagcaaaaaaaaaaaaaaaaaaaaaaaaaaaaaagcatatgactaaaaaaaaaaaaaaaaaaaaaaaaaaaaaaaaaaaaaaaaaaaaaaaaaaaaaaaaaaaaaaaaaaaaaa

SEQ ID NO: 965 - RNA, 1937 nt, synthetic construct
  source 1..1937: mol_type = other RNA
agaataaactagtattcttctggtccccacagactcagagagaacccgccaccatggattggatctggcgcatcctgtttctcgtgggagctgccacaggcgcccactctcaagttcacctgacacagtctggccccgaagtgcggaagcctggcacaagcgtgaaggtgtcctgtaaagcccctggcaacaccctgaaaacctacgacctgcactgggtccgatctgtgcctggacaaggactgcagtggatgggctggattagccacgagggcgacaagaaagtgatcgtggaacggttcaaggccaaagtgaccatcgactgggacagaagcaccaacaccgcctacctgcagctgagcggactgacatctggcgataccgccgtgtactactgtgccaagggcagcaagcaccggctgagagattacgccctgtacgacgatgacggcgccctgaattgggccgtcgatgtggactacctgagcaacctggaattctggggccagggaacagccgtgacagtgtctagtgcttccacaaagggccctagcgtgttccctctggctcctagcagcaagtctacaagcggaggaacagctgccctgggctgcctggtggaagattactttcctgagcctgtgaccgtgtcctggaacagcggtgctctgacttctggcgtgcacacctttccagccgtgctgcaaagcagcggcctgtactctctgagcagcgtggtcacagtgccaagctctagcctgggcacccagacctacatctgcaatgtgaaccacaagcctagcaacaccaaggtggacgacaaggtggaacccaagagctgcgacaagacccacacctgtcctccatgtcctgctccagaactgctcggcggaccttccgtgttcctgtttcctccaaagcctaaggacaccctgatgatcagcagaacccctgaagtgacctgcgtggtggtggatgtgtctcacgaggaccccgaagtgaagttcaattggtacgtggacggcgtggaagtgcacaacgccaagaccaagcctagagaggaacagtacaacagcacctacagagtggtgtccgtgctgacagtgctgcaccaggattggctgaacggcaaagagtacaagtgcaaggtgtccaacaaggccctgcctgctcctatcgagaaaaccatcagcaaggccaagggccagcctagggaaccccaggtttacacactgcctccaagccgcgaggaaatgaccaagaaccaggtgtccctgacctgcctcgtgaagggcttctacccttccgatatcgccgtggaatgggagagcaatggccagcctgagaacaactacaagacaacccctcctgtgctggacagcgacggctcattcttcctgtacagcaagctgactgtggataagtcccggtggcagcagggcaacgtgttcagctgttctgtgatgcacgaagccctgcacaaccactacacccagaaaagcctgtctctgagccccggcaagtgataaggatccgatctggtactgcatgcacgcaatgctagctgcccctttcccgtcctgggtaccccgagtctcccccgacctcgggtcccaggtatgctcccacctccacctgccccactcaccacctctgctagttccagacacctcccaagcacgcagcaatgcagctcaaaacgcttagcctagccacacccccacgggaaacagcagtgattaacctttagcaataaacgaaagtttaactaagctatactaaccccagggttggtcaatttcgtgccagccacaccctcgagctagcaaaaaaaaaaaaaaaaaaaaaaaaaaaaaagcatatgactaaaaaaaaaaaaaaaaaaaaaaaaaaaaaaaaaaaaaaaaaaaaaaaaaaaaaaaaaaaaaaaaaaaaaa

SEQ ID NO: 966 - RNA, 1937 nt, synthetic construct
  source 1..1937: mol_type = other RNA
agaataaactagtattcttctggtccccacagactcagagagaacccgccaccatggattggatctggcgcatcctgtttctcgtgggagctgccacaggcgcccactctcaagttcacctgacacagtctggccccgaagtgcggaagcctggcacaagcgtgaaggtgtcctgtaaagcccctggcaacaccctgaaaacctacgacctgcactgggtccgatctgtgcctggacaaggactgcagtggatgggctggattagccacgagggcgacaagaaagtgatcgtggaacggttcaaggccaaagtgaccatcgactgggacagaagcaccaacaccgcctacctgcagctgagcggactgacatctggcgataccgccgtgtactactgtgccaagggcagcaagcaccggctgagagattacgccctgtacgacgatgacggcgccctgaattgggccgtcgatgtggactacctgagcaacctggaattctggggccagggaacagccgtgacagtgtctagtgcttccacaaagggccctagcgtgttccctctggctcctagcagcaagtctacaagcggaggaacagctgccctgggctgcctggtggaagattactttcctgagcctgtgaccgtgtcctggaacagcggtgctctgacttctggcgtgcacacctttccagccgtgctgcaaagcagcggcctgtactctctgagcagcgtggtcacagtgccaagctctagcctgggcacccagacctacatctgcaatgtgaaccacaagcctagcaacaccaaggtggacgacaaggtggaacccaagagctgcgacaagacccacacctgtcctccatgtcctgctccagaactgctcggcggaccttccgtgttcctgtttcctccaaagcctaaggacaccctgatgatcagcagaacccctgaagtgacctgcgtggtggtggatgtgtctcacgaggaccccgaagtgaagttcaattggtacgtggacggcgtggaagtgcacaacgccaagaccaagcctagagaggaacagtacaacagcacctacagagtggtgtccgtgctgacagtgctgcaccaggattggctgaacggcaaagagtacaagtgcaaggtgtccaacaaggccctgcctgctcctatcgagaaaaccatcagcaaggccaagggccagcctagggaaccccaggtttacacactgcctccaagccgcgaggaaatgaccaagaaccaggtgtccctgacctgcctcgtgaagggcttctacccttccgatatcgccgtggaatgggagagcaatggccagcctgagaacaactacaagacaacccctcctgtgctggacagcgacggctcattcttcctgtacagcaagctgaccgtggacaagtccagatggcagcagggcaacgtgttcagctgtagcgtgctgcacgaagccctgcacagccactacacccagaaaagcctgtctctgagccccggcaaatgataaggatccgatctggtactgcatgcacgcaatgctagctgcccctttcccgtcctgggtaccccgagtctcccccgacctcgggtcccaggtatgctcccacctccacctgccccactcaccacctctgctagttccagacacctcccaagcacgcagcaatgcagctcaaaacgcttagcctagccacacccccacgggaaacagcagtgattaacctttagcaataaacgaaagtttaactaagctatactaaccccagggttggtcaatttcgtgccagccacaccctcgagctagcaaaaaaaaaaaaaaaaaaaaaaaaaaaaaagcatatgactaaaaaaaaaaaaaaaaaaaaaaaaaaaaaaaaaaaaaaaaaaaaaaaaaaaaaaaaaaaaaaaaaaaaaa

SEQ ID NO: 967 - RNA, 1937 nt, synthetic construct
  source 1..1937: mol_type = other RNA
agaataaactagtattcttctggtccccacagactcagagagaacccgccaccatggattggatctggcgcatcctgtttctcgtgggagctgccacaggcgcccactctcaagttcacctgacacagtctggccccgaagtgcggaagcctggcacaagcgtgaaggtgtcctgtaaagcccctggcaacaccctgaaaacctacgacctgcactgggtccgatctgtgcctggacaaggactgcagtggatgggctggattagccacgagggcgacaagaaagtgatcgtggaacggttcaaggccaaagtgaccatcgactgggacagaagcaccaacaccgcctacctgcagctgagcggactgacatctggcgataccgccgtgtactactgtgccaagggcagcaagcaccggctgagagattacgccctgtacgacgatgacggcgccctgaattgggccgtcgatgtggactacctgagcaacctggaattctggggccagggaacagccgtgacagtgtctagtgcttccacaaagggccctagcgtgttccctctggctcctagcagcaagtctacaagcggaggaacagctgccctgggctgcctggtggaagattactttcctgagcctgtgaccgtgtcctggaacagcggtgctctgacttctggcgtgcacacctttccagccgtgctgcaaagcagcggcctgtactctctgagcagcgtggtcacagtgccaagctctagcctgggcacccagacctacatctgcaatgtgaaccacaagcctagcaacaccaaggtggacgacaaggtggaacccaagagctgcgacaagacccacacctgtcctccatgtcctgctccagaactgctggccggaccttccgtgttcctgtttcctccaaagcctaaggacaccctgatgatcagcagaacccctgaagtgacctgcgtggtggtggatgtgtctcacgaggaccccgaagtgaagttcaattggtacgtggacggcgtggaagtgcacaatgccaagaccaagcctagagaggaacagtacaacagcacctacagagtggtgtccgtgctgaccgtgctgcaccaggattggctgaacggcaaagagtacaagtgcaaggtgtccaacaaggccctgcctctgcctgaggaaaagaccatcagcaaggccaagggccagcctagggaaccccaggtttacacactgcctccaagccgcgaggaaatgaccaagaaccaggtgtccctgacctgcctcgtgaagggcttctacccttccgatatcgccgtggaatgggagagcaatggccagcctgagaacaactacaagacaacccctcctgtgctggacagcgacggctcattcttcctgtacagcaagctgaccgtggacaagtccagatggcagcagggcaacgtgttcagctgtagcgtgctgcacgaagccctgcacagccactacacccagaaaagcctgtctctgagccccggcaaatgataaggatccgatctggtactgcatgcacgcaatgctagctgcccctttcccgtcctgggtaccccgagtctcccccgacctcgggtcccaggtatgctcccacctccacctgccccactcaccacctctgctagttccagacacctcccaagcacgcagcaatgcagctcaaaacgcttagcctagccacacccccacgggaaacagcagtgattaacctttagcaataaacgaaagtttaactaagctatactaaccccagggttggtcaatttcgtgccagccacaccctcgagctagcaaaaaaaaaaaaaaaaaaaaaaaaaaaaaagcatatgactaaaaaaaaaaaaaaaaaaaaaaaaaaaaaaaaaaaaaaaaaaaaaaaaaaaaaaaaaaaaaaaaaaaaaa

SEQ ID NO: 968 - RNA, 1937 nt, synthetic construct
  source 1..1937: mol_type = other RNA
agaataaactagtattcttctggtccccacagactcagagagaacccgccaccatggattggatctggcgcatcctgtttctcgtgggagctgccacaggcgcccactctcaagttcacctgacacagtctggccccgaagtgcggaagcctggcacaagcgtgaaggtgtcctgtaaagcccctggcaacaccctgaaaacctacgacctgcactgggtccgatctgtgcctggacaaggactgcagtggatgggctggattagccacgagggcgacaagaaagtgatcgtggaacggttcaaggccaaagtgaccatcgactgggacagaagcaccaacaccgcctacctgcagctgagcggactgacatctggcgataccgccgtgtactactgtgccaagggcagcaagcaccggctgagagattacgccctgtacgacgatgacggcgccctgaattgggccgtcgatgtggactacctgagcaacctggaattctggggccagggaacagccgtgacagtgtctagtgcttccacaaagggccctagcgtgttccctctggctcctagcagcaagtctacaagcggaggaacagctgccctgggctgcctggtggaagattactttcctgagcctgtgaccgtgtcctggaacagcggtgctctgacttctggcgtgcacacctttccagccgtgctgcaaagcagcggcctgtactctctgagcagcgtggtcacagtgccaagctctagcctgggcacccagacctacatctgcaatgtgaaccacaagcctagcaacaccaaggtggacgacaaggtggaacccaagagctgcgacaagacccacacctgtcctccatgtcctgctccagaactgctggccggaccttccgtgttcctgtttcctccaaagcctaaggacaccctgatgatcagcagaacccctgaagtgacctgcgtggtggtggatgtgtctcacgaggaccctgaagtgaagttcaattggtacgtggacggcgtggaagtgcacaacgccaagaccaagcctagagaggaacagtacaacagcacctacagagtggtgtccgtgctgaccgtgctgcaccaggattggctgaacggcaaagagtacaagtgcaaggtgtccaacaaggccctgcctgcccctgaggaaaagaccatcagcaaggccaagggccagcctagggaaccccaggtttacacactgcctccaagccgcgaggaaatgaccaagaaccaggtgtccctgacctgcctcgtgaagggcttctacccttccgatatcgccgtggaatgggagagcaatggccagcctgagaacaactacaagacaacccctcctgtgctggacagcgacggctcattcttcctgtacagcaagctgaccgtggacaagtccagatggcagcagggcaacgtgttcagctgtagcgtgctgcacgaagccctgcacagccactacacccagaaaagcctgtctctgagccccggcaaatgataaggatccgatctggtactgcatgcacgcaatgctagctgcccctttcccgtcctgggtaccccgagtctcccccgacctcgggtcccaggtatgctcccacctccacctgccccactcaccacctctgctagttccagacacctcccaagcacgcagcaatgcagctcaaaacgcttagcctagccacacccccacgggaaacagcagtgattaacctttagcaataaacgaaagtttaactaagctatactaaccccagggttggtcaatttcgtgccagccacaccctcgagctagcaaaaaaaaaaaaaaaaaaaaaaaaaaaaaagcatatgactaaaaaaaaaaaaaaaaaaaaaaaaaaaaaaaaaaaaaaaaaaaaaaaaaaaaaaaaaaaaaaaaaaaaaa

SEQ ID NO: 969 - RNA, 1937 nt, synthetic construct
  source 1..1937: mol_type = other RNA
agaataaactagtattcttctggtccccacagactcagagagaacccgccaccatggattggatctggcgcatcctgtttctcgtgggagctgccacaggcgcccactctcaagttcacctgacacagtctggccccgaagtgcggaagcctggcacaagcgtgaaggtgtcctgtaaagcccctggcaacaccctgaaaacctacgacctgcactgggtccgatctgtgcctggacaaggactgcagtggatgggctggattagccacgagggcgacaagaaagtgatcgtggaacggttcaaggccaaagtgaccatcgactgggacagaagcaccaacaccgcctacctgcagctgagcggactgacatctggcgataccgccgtgtactactgtgccaagggcagcaagcaccggctgagagattacgccctgtacgacgatgacggcgccctgaattgggccgtcgatgtggactacctgagcaacctggaattctggggccagggaacagccgtgacagtgtctagtgcttccacaaagggccctagcgtgttccctctggctcctagcagcaagtctacaagcggaggaacagctgccctgggctgcctggtggaagattactttcctgagcctgtgaccgtgtcctggaacagcggtgctctgacttctggcgtgcacacctttccagccgtgctgcaaagcagcggcctgtactctctgagcagcgtggtcacagtgccaagctctagcctgggcacccagacctacatctgcaatgtgaaccacaagcctagcaacaccaaggtggacgacaaggtggaacccaagagctgcgacaagacccacacctgtcctccatgtcctgctccagaactgctggccggaccttccgtgttcctgtttcctccaaagcctaaggacaccctgatgatcagcagaacccctgaagtgacctgcgtggtggtggatgtgtctcacgaggaccctgaagtgaagttcaattggtacgtggacggcgtggaagtgcacaacgccaagaccaagcctagagaggaacagtacaacagcacctacagagtggtgtccgtgctgaccgtgctgcaccaggattggctgaacggcaaagagtacaagtgcaaggtgtccaacaaggccctgcctgcccctatcgaaaagaccatcagcaaggccaagggccagcctagggaaccccaggtttacacactgcctccaagccgcgaggaaatgaccaagaaccaggtgtccctgacctgcctcgtgaagggcttctacccttccgatatcgccgtggaatgggagagcaatggccagcctgagaacaactacaagacaacccctcctgtgctggacagcgacggctcattcttcctgtacagcaagctgaccgtggacaagtccagatggcagcagggcaacgtgttcagctgtagcgtgctgcacgaagccctgcacagccactacacccagaaaagcctgtctctgagccccggcaaatgataaggatccgatctggtactgcatgcacgcaatgctagctgcccctttcccgtcctgggtaccccgagtctcccccgacctcgggtcccaggtatgctcccacctccacctgccccactcaccacctctgctagttccagacacctcccaagcacgcagcaatgcagctcaaaacgcttagcctagccacacccccacgggaaacagcagtgattaacctttagcaataaacgaaagtttaactaagctatactaaccccagggttggtcaatttcgtgccagccacaccctcgagctagcaaaaaaaaaaaaaaaaaaaaaaaaaaaaaagcatatgactaaaaaaaaaaaaaaaaaaaaaaaaaaaaaaaaaaaaaaaaaaaaaaaaaaaaaaaaaaaaaaaaaaaaaa

SEQ ID NO: 970 - RNA, 1937 nt, synthetic construct
  source 1..1937: mol_type = other RNA
agaataaactagtattcttctggtccccacagactcagagagaacccgccaccatggattggatctggcgcatcctgtttctcgtgggagctgccacaggcgcccactctcaagttcacctgacacagtctggccccgaagtgcggaagcctggcacaagcgtgaaggtgtcctgtaaagcccctggcaacaccctgaaaacctacgacctgcactgggtccgatctgtgcctggacaaggactgcagtggatgggctggattagccacgagggcgacaagaaagtgatcgtggaacggttcaaggccaaagtgaccatcgactgggacagaagcaccaacaccgcctacctgcagctgagcggactgacatctggcgataccgccgtgtactactgtgccaagggcagcaagcaccggctgagagattacgccctgtacgacgatgacggcgccctgaattgggccgtcgatgtggactacctgagcaacctggaattctggggccagggaacagccgtgacagtgtctagtgcttccacaaagggccctagcgtgttccctctggctcctagcagcaagtctacaagcggaggaacagctgccctgggctgcctggtggaagattactttcctgagcctgtgaccgtgtcctggaacagcggtgctctgacttctggcgtgcacacctttccagccgtgctgcaaagcagcggcctgtactctctgagcagcgtggtcacagtgccaagctctagcctgggcacccagacctacatctgcaatgtgaaccacaagcctagcaacaccaaggtggacgacaaggtggaacccaagagctgcgacaagacccacacctgtcctccatgtcctgctccagaactgctgggcggaccttccgtgttcctgtttcctccaaagcctaaggacaccctgatgatcagcagaacccctgaagtgacctgcgtggtggtggatgtgtctcacgaggaccctgaagtgaagttcaattggtacgtggacggcgtggaagtgcacaacgccaagaccaagcctagagaggaacagtacaacagcacctacagagtggtgtccgtgctgaccgtgctgcaccaggattggctgaacggcaaagagtacaagtgcaaggtgtccaacaaggccctgcctgcccctgaggaaaagaccatcagcaaggccaagggccagcctagggaaccccaggtttacacactgcctccaagccgcgaggaaatgaccaagaaccaggtgtccctgacctgcctcgtgaagggcttctacccttccgatatcgccgtggaatgggagagcaatggccagcctgagaacaactacaagacaacccctcctgtgctggacagcgacggctcattcttcctgtacagcaagctgaccgtggacaagtccagatggcagcagggcaacgtgttcagctgtagcgtgctgcacgaagccctgcacagccactacacccagaaaagcctgtctctgagccccggcaaatgataaggatccgatctggtactgcatgcacgcaatgctagctgcccctttcccgtcctgggtaccccgagtctcccccgacctcgggtcccaggtatgctcccacctccacctgccccactcaccacctctgctagttccagacacctcccaagcacgcagcaatgcagctcaaaacgcttagcctagccacacccccacgggaaacagcagtgattaacctttagcaataaacgaaagtttaactaagctatactaaccccagggttggtcaatttcgtgccagccacaccctcgagctagcaaaaaaaaaaaaaaaaaaaaaaaaaaaaaagcatatgactaaaaaaaaaaaaaaaaaaaaaaaaaaaaaaaaaaaaaaaaaaaaaaaaaaaaaaaaaaaaaaaaaaaaaa

SEQ ID NO: 971 - RNA, 1937 nt, synthetic construct
  source 1..1937: mol_type = other RNA
agaataaactagtattcttctggtccccacagactcagagagaacccgccaccatggattggatctggcgcatcctgtttctcgtgggagctgccacaggcgcccactctcaagttcacctgacacagtctggccccgaagtgcggaagcctggcacaagcgtgaaggtgtcctgtaaagcccctggcaacaccctgaaaacctacgacctgcactgggtccgatctgtgcctggacaaggactgcagtggatgggctggattagccacgagggcgacaagaaagtgatcgtggaacggttcaaggccaaagtgaccatcgactgggacagaagcaccaacaccgcctacctgcagctgagcggactgacatctggcgataccgccgtgtactactgtgccaagggcagcaagcaccggctgagagattacgccctgtacgacgatgacggcgccctgaattgggccgtcgatgtggactacctgagcaacctggaattctggggccagggaacagccgtgacagtgtctagtgcttccacaaagggccctagcgtgttccctctggctcctagcagcaagtctacaagcggaggaacagctgccctgggctgcctggtggaagattactttcctgagcctgtgaccgtgtcctggaacagcggtgctctgacttctggcgtgcacacctttccagccgtgctgcaaagcagcggcctgtactctctgagcagcgtggtcacagtgccaagctctagcctgggcacccagacctacatctgcaatgtgaaccacaagcctagcaacaccaaggtggacgacaaggtggaacccaagagctgcgacaagacccacacctgtcctccatgtcctgctccagaactgctcggcggaccttccgtgttcctgtttcctccaaagcctaaggacaccctgatgatcagcagaacccctgaagtgacctgcgtggtggtggatgtgtctcacgaggaccccgaagtgaagttcaattggtacgtggacggcgtggaagtgcacaacgccaagaccaagcctagagaggaacagtacaacagcacctacagagtggtgtccgtgctgacagtgctgcaccaggattggctgaacggcaaagagtacaagtgcaaggtgtccaacaaggccctgcctgctcctatcgagaaaaccatcagcaaggccaagggccagcctagggaaccccaagtctgtacactgcctcctagccgcgaggaaatgaccaagaaccaggtgtccctgagctgcgccgtgaagggcttttacccttccgatatcgccgtggaatgggagagcaatggccagcctgagaacaactacaagacaacccctcctgtgctggacagcgacggctcattcttcctggtgtccaagctgacagtggacaagagcagatggcagcagggcaacgtgttcagctgctctgtgctgcacgaagccctgcacagccactacacccagaagtccctgtctctgagccccggcaagtgataaggatccgatctggtactgcatgcacgcaatgctagctgcccctttcccgtcctgggtaccccgagtctcccccgacctcgggtcccaggtatgctcccacctccacctgccccactcaccacctctgctagttccagacacctcccaagcacgcagcaatgcagctcaaaacgcttagcctagccacacccccacgggaaacagcagtgattaacctttagcaataaacgaaagtttaactaagctatactaaccccagggttggtcaatttcgtgccagccacaccctcgagctagcaaaaaaaaaaaaaaaaaaaaaaaaaaaaaagcatatgactaaaaaaaaaaaaaaaaaaaaaaaaaaaaaaaaaaaaaaaaaaaaaaaaaaaaaaaaaaaaaaaaaaaaaa

SEQ ID NO: 972 - RNA, 1937 nt, synthetic construct
  source 1..1937: mol_type = other RNA
agaataaactagtattcttctggtccccacagactcagagagaacccgccaccatggattggatctggcgcatcctgtttctcgtgggagctgccacaggcgcccactctcaagttcacctgacacagtctggccccgaagtgcggaagcctggcacaagcgtgaaggtgtcctgtaaagcccctggcaacaccctgaaaacctacgacctgcactgggtccgatctgtgcctggacaaggactgcagtggatgggctggattagccacgagggcgacaagaaagtgatcgtggaacggttcaaggccaaagtgaccatcgactgggacagaagcaccaacaccgcctacctgcagctgagcggactgacatctggcgataccgccgtgtactactgtgccaagggcagcaagcaccggctgagagattacgccctgtacgacgatgacggcgccctgaattgggccgtcgatgtggactacctgagcaacctggaattctggggccagggaacagccgtgacagtgtctagtgcttccacaaagggccctagcgtgttccctctggctcctagcagcaagtctacaagcggaggaacagctgccctgggctgcctggtggaagattactttcctgagcctgtgaccgtgtcctggaacagcggtgctctgacttctggcgtgcacacctttccagccgtgctgcaaagcagcggcctgtactctctgagcagcgtggtcacagtgccaagctctagcctgggcacccagacctacatctgcaatgtgaaccacaagcctagcaacaccaaggtggacgacaaggtggaacccaagagctgcgacaagacccacacctgtcctccatgtcctgctccagaactgctggccggaccttccgtgttcctgtttcctccaaagcctaaggacaccctgatgatcagcagaacccctgaagtgacctgcgtggtggtggatgtgtctcacgaggaccccgaagtgaagttcaattggtacgtggacggcgtggaagtgcacaatgccaagaccaagcctagagaggaacagtacaacagcacctacagagtggtgtccgtgctgaccgtgctgcaccaggattggctgaacggcaaagagtacaagtgcaaggtgtccaacaaggccctgcctctgcctgaggaaaagaccatcagcaaggccaagggccagcctagggaaccccaagtctgtacactgcctcctagccgcgaggaaatgaccaagaaccaggtgtccctgagctgcgccgtgaagggcttttacccttccgatatcgccgtggaatgggagagcaatggccagcctgagaacaactacaagacaacccctcctgtgctggacagcgacggctcattcttcctggtgtccaagctgacagtggacaagagcagatggcagcagggcaacgtgttcagctgctctgtgctgcacgaagccctgcacagccactacacccagaagtccctgtctctgagccccggcaagtgataaggatccgatctggtactgcatgcacgcaatgctagctgcccctttcccgtcctgggtaccccgagtctcccccgacctcgggtcccaggtatgctcccacctccacctgccccactcaccacctctgctagttccagacacctcccaagcacgcagcaatgcagctcaaaacgcttagcctagccacacccccacgggaaacagcagtgattaacctttagcaataaacgaaagtttaactaagctatactaaccccagggttggtcaatttcgtgccagccacaccctcgagctagcaaaaaaaaaaaaaaaaaaaaaaaaaaaaaagcatatgactaaaaaaaaaaaaaaaaaaaaaaaaaaaaaaaaaaaaaaaaaaaaaaaaaaaaaaaaaaaaaaaaaaaaaa

SEQ ID NO: 973 - RNA, 1937 nt, synthetic construct
  source 1..1937: mol_type = other RNA
agaataaactagtattcttctggtccccacagactcagagagaacccgccaccatggattggatctggcgcatcctgtttctcgtgggagctgccacaggcgcccactctcaagttcacctgacacagtctggccccgaagtgcggaagcctggcacaagcgtgaaggtgtcctgtaaagcccctggcaacaccctgaaaacctacgacctgcactgggtccgatctgtgcctggacaaggactgcagtggatgggctggattagccacgagggcgacaagaaagtgatcgtggaacggttcaaggccaaagtgaccatcgactgggacagaagcaccaacaccgcctacctgcagctgagcggactgacatctggcgataccgccgtgtactactgtgccaagggcagcaagcaccggctgagagattacgccctgtacgacgatgacggcgccctgaattgggccgtcgatgtggactacctgagcaacctggaattctggggccagggaacagccgtgacagtgtctagtgcttccacaaagggccctagcgtgttccctctggctcctagcagcaagtctacaagcggaggaacagctgccctgggctgcctggtggaagattactttcctgagcctgtgaccgtgtcctggaacagcggtgctctgacttctggcgtgcacacctttccagccgtgctgcaaagcagcggcctgtactctctgagcagcgtggtcacagtgccaagctctagcctgggcacccagacctacatctgcaatgtgaaccacaagcctagcaacaccaaggtggacgacaaggtggaacccaagagctgcgacaagacccacacctgtcctccatgtcctgctccagaactgctggccggaccttccgtgttcctgtttcctccaaagcctaaggacaccctgatgatcagcagaacccctgaagtgacctgcgtggtggtggatgtgtctcacgaggaccctgaagtgaagttcaattggtacgtggacggcgtggaagtgcacaacgccaagaccaagcctagagaggaacagtacaacagcacctacagagtggtgtccgtgctgaccgtgctgcaccaggattggctgaacggcaaagagtacaagtgcaaggtgtccaacaaggccctgcctgcccctgaggaaaagaccatcagcaaggccaagggccagcctagggaaccccaagtctgtacactgcctcctagccgcgaggaaatgaccaagaaccaggtgtccctgagctgcgccgtgaagggcttttacccttccgatatcgccgtggaatgggagagcaatggccagcctgagaacaactacaagacaacccctcctgtgctggacagcgacggctcattcttcctggtgtccaagctgacagtggacaagagcagatggcagcagggcaacgtgttcagctgctctgtgctgcacgaagccctgcacagccactacacccagaagtccctgtctctgagccccggcaagtgataaggatccgatctggtactgcatgcacgcaatgctagctgcccctttcccgtcctgggtaccccgagtctcccccgacctcgggtcccaggtatgctcccacctccacctgccccactcaccacctctgctagttccagacacctcccaagcacgcagcaatgcagctcaaaacgcttagcctagccacacccccacgggaaacagcagtgattaacctttagcaataaacgaaagtttaactaagctatactaaccccagggttggtcaatttcgtgccagccacaccctcgagctagcaaaaaaaaaaaaaaaaaaaaaaaaaaaaaagcatatgactaaaaaaaaaaaaaaaaaaaaaaaaaaaaaaaaaaaaaaaaaaaaaaaaaaaaaaaaaaaaaaaaaaaaaa

SEQ ID NO: 974 - RNA, 1937 nt, synthetic construct
  source 1..1937: mol_type = other RNA
agaataaactagtattcttctggtccccacagactcagagagaacccgccaccatggattggatctggcgcatcctgtttctcgtgggagctgccacaggcgcccactctcaagttcacctgacacagtctggccccgaagtgcggaagcctggcacaagcgtgaaggtgtcctgtaaagcccctggcaacaccctgaaaacctacgacctgcactgggtccgatctgtgcctggacaaggactgcagtggatgggctggattagccacgagggcgacaagaaagtgatcgtggaacggttcaaggccaaagtgaccatcgactgggacagaagcaccaacaccgcctacctgcagctgagcggactgacatctggcgataccgccgtgtactactgtgccaagggcagcaagcaccggctgagagattacgccctgtacgacgatgacggcgccctgaattgggccgtcgatgtggactacctgagcaacctggaattctggggccagggaacagccgtgacagtgtctagtgcttccacaaagggccctagcgtgttccctctggctcctagcagcaagtctacaagcggaggaacagctgccctgggctgcctggtggaagattactttcctgagcctgtgaccgtgtcctggaacagcggtgctctgacttctggcgtgcacacctttccagccgtgctgcaaagcagcggcctgtactctctgagcagcgtggtcacagtgccaagctctagcctgggcacccagacctacatctgcaatgtgaaccacaagcctagcaacaccaaggtggacgacaaggtggaacccaagagctgcgacaagacccacacctgtcctccatgtcctgctccagaactgctggccggaccttccgtgttcctgtttcctccaaagcctaaggacaccctgatgatcagcagaacccctgaagtgacctgcgtggtggtggatgtgtctcacgaggaccctgaagtgaagttcaattggtacgtggacggcgtggaagtgcacaacgccaagaccaagcctagagaggaacagtacaacagcacctacagagtggtgtccgtgctgaccgtgctgcaccaggattggctgaacggcaaagagtacaagtgcaaggtgtccaacaaggccctgcctgcccctatcgaaaagaccatcagcaaggccaagggccagcctagggaaccccaagtctgtacactgcctcctagccgcgaggaaatgaccaagaaccaggtgtccctgagctgcgccgtgaagggcttttacccttccgatatcgccgtggaatgggagagcaatggccagcctgagaacaactacaagacaacccctcctgtgctggacagcgacggctcattcttcctggtgtccaagctgacagtggacaagagcagatggcagcagggcaacgtgttcagctgctctgtgctgcacgaagccctgcacagccactacacccagaagtccctgtctctgagccccggcaagtgataaggatccgatctggtactgcatgcacgcaatgctagctgcccctttcccgtcctgggtaccccgagtctcccccgacctcgggtcccaggtatgctcccacctccacctgccccactcaccacctctgctagttccagacacctcccaagcacgcagcaatgcagctcaaaacgcttagcctagccacacccccacgggaaacagcagtgattaacctttagcaataaacgaaagtttaactaagctatactaaccccagggttggtcaatttcgtgccagccacaccctcgagctagcaaaaaaaaaaaaaaaaaaaaaaaaaaaaaagcatatgactaaaaaaaaaaaaaaaaaaaaaaaaaaaaaaaaaaaaaaaaaaaaaaaaaaaaaaaaaaaaaaaaaaaaaa

SEQ ID NO: 975 - RNA, 1937 nt, synthetic construct
  source 1..1937: mol_type = other RNA
agaataaactagtattcttctggtccccacagactcagagagaacccgccaccatggattggatctggcgcatcctgtttctcgtgggagctgccacaggcgcccactctcaagttcacctgacacagtctggccccgaagtgcggaagcctggcacaagcgtgaaggtgtcctgtaaagcccctggcaacaccctgaaaacctacgacctgcactgggtccgatctgtgcctggacaaggactgcagtggatgggctggattagccacgagggcgacaagaaagtgatcgtggaacggttcaaggccaaagtgaccatcgactgggacagaagcaccaacaccgcctacctgcagctgagcggactgacatctggcgataccgccgtgtactactgtgccaagggcagcaagcaccggctgagagattacgccctgtacgacgatgacggcgccctgaattgggccgtcgatgtggactacctgagcaacctggaattctggggccagggaacagccgtgacagtgtctagtgcttccacaaagggccctagcgtgttccctctggctcctagcagcaagtctacaagcggaggaacagctgccctgggctgcctggtggaagattactttcctgagcctgtgaccgtgtcctggaacagcggtgctctgacttctggcgtgcacacctttccagccgtgctgcaaagcagcggcctgtactctctgagcagcgtggtcacagtgccaagctctagcctgggcacccagacctacatctgcaatgtgaaccacaagcctagcaacaccaaggtggacgacaaggtggaacccaagagctgcgacaagacccacacctgtcctccatgtcctgctccagaactgctgggcggaccttccgtgttcctgtttcctccaaagcctaaggacaccctgatgatcagcagaacccctgaagtgacctgcgtggtggtggatgtgtctcacgaggaccctgaagtgaagttcaattggtacgtggacggcgtggaagtgcacaacgccaagaccaagcctagagaggaacagtacaacagcacctacagagtggtgtccgtgctgaccgtgctgcaccaggattggctgaacggcaaagagtacaagtgcaaggtgtccaacaaggccctgcctgcccctgaggaaaagaccatcagcaaggccaagggccagcctagggaaccccaagtctgtacactgcctcctagccgcgaggaaatgaccaagaaccaggtgtccctgagctgcgccgtgaagggcttttacccttccgatatcgccgtggaatgggagagcaatggccagcctgagaacaactacaagacaacccctcctgtgctggacagcgacggctcattcttcctggtgtccaagctgacagtggacaagagcagatggcagcagggcaacgtgttcagctgctctgtgctgcacgaagccctgcacagccactacacccagaagtccctgtctctgagccccggcaagtgataaggatccgatctggtactgcatgcacgcaatgctagctgcccctttcccgtcctgggtaccccgagtctcccccgacctcgggtcccaggtatgctcccacctccacctgccccactcaccacctctgctagttccagacacctcccaagcacgcagcaatgcagctcaaaacgcttagcctagccacacccccacgggaaacagcagtgattaacctttagcaataaacgaaagtttaactaagctatactaaccccagggttggtcaatttcgtgccagccacaccctcgagctagcaaaaaaaaaaaaaaaaaaaaaaaaaaaaaagcatatgactaaaaaaaaaaaaaaaaaaaaaaaaaaaaaaaaaaaaaaaaaaaaaaaaaaaaaaaaaaaaaaaaaaaaaa

SEQ ID NO: 976 - RNA, 1937 nt, synthetic construct
  source 1..1937: mol_type = other RNA
agaataaactagtattcttctggtccccacagactcagagagaacccgccaccatggattggatctggcgcatcctgtttctcgtgggagctgccacaggcgcccactctcaagttcacctgacacagtctggccccgaagtgcggaagcctggcacaagcgtgaaggtgtcctgtaaagcccctggcaacaccctgaaaacctacgacctgcactgggtccgatctgtgcctggacaaggactgcagtggatgggctggattagccacgagggcgacaagaaagtgatcgtggaacggttcaaggccaaagtgaccatcgactgggacagaagcaccaacaccgcctacctgcagctgagcggactgacatctggcgataccgccgtgtactactgtgccaagggcagcaagcaccggctgagagattacgccctgtacgacgatgacggcgccctgaattgggccgtcgatgtggactacctgagcaacctggaattctggggccagggaacagccgtgacagtgtctagtgcttccacaaagggccctagcgtgttccctctggctcctagcagcaagtctacaagcggaggaacagctgccctgggctgcctggtggaagattactttcctgagcctgtgaccgtgtcctggaacagcggtgctctgacttctggcgtgcacacctttccagccgtgctgcaaagcagcggcctgtactctctgagcagcgtggtcacagtgccaagctctagcctgggcacccagacctacatctgcaatgtgaaccacaagcctagcaacaccaaggtggacgacaaggtggaacccaagagctgcgacaagacccacacctgtcctccatgtcctgctccagaactgctcggcggaccttccgtgttcctgtttcctccaaagcctaaggacaccctgatgatcagcagaacccctgaagtgacctgcgtggtggtggatgtgtctcacgaggaccccgaagtgaagttcaattggtacgtggacggcgtggaagtgcacaacgccaagaccaagcctagagaggaacagtacaacagcacctacagagtggtgtccgtgctgacagtgctgcaccaggattggctgaacggcaaagagtacaagtgcaaggtgtccaacaaggccctgcctgctcctatcgagaaaaccatcagcaaggccaagggccagcctagggaaccccaggtttacaccctgcctccatgccgcgaggaaatgaccaagaaccaggtgtccctgtggtgcctcgtgaagggcttctacccttccgatatcgccgtggaatgggagagcaatggccagcctgagaacaactacaagacaacccctcctgtgctggacagcgacggctcattcttcctgtacagcaagctgaccgtggacaagtccagatggcagcagggcaacgtgttcagctgtagcgtgctgcacgaagccctgcacagccactacacccagaagtccctgtctctgagccccggcaagtgataaggatccgatctggtactgcatgcacgcaatgctagctgcccctttcccgtcctgggtaccccgagtctcccccgacctcgggtcccaggtatgctcccacctccacctgccccactcaccacctctgctagttccagacacctcccaagcacgcagcaatgcagctcaaaacgcttagcctagccacacccccacgggaaacagcagtgattaacctttagcaataaacgaaagtttaactaagctatactaaccccagggttggtcaatttcgtgccagccacaccctcgagctagcaaaaaaaaaaaaaaaaaaaaaaaaaaaaaagcatatgactaaaaaaaaaaaaaaaaaaaaaaaaaaaaaaaaaaaaaaaaaaaaaaaaaaaaaaaaaaaaaaaaaaaaaa

SEQ ID NO: 977 - RNA, 1937 nt, synthetic construct
  source 1..1937: mol_type = other RNA
agaataaactagtattcttctggtccccacagactcagagagaacccgccaccatggattggatctggcgcatcctgtttctcgtgggagctgccacaggcgcccactctcaagttcacctgacacagtctggccccgaagtgcggaagcctggcacaagcgtgaaggtgtcctgtaaagcccctggcaacaccctgaaaacctacgacctgcactgggtccgatctgtgcctggacaaggactgcagtggatgggctggattagccacgagggcgacaagaaagtgatcgtggaacggttcaaggccaaagtgaccatcgactgggacagaagcaccaacaccgcctacctgcagctgagcggactgacatctggcgataccgccgtgtactactgtgccaagggcagcaagcaccggctgagagattacgccctgtacgacgatgacggcgccctgaattgggccgtcgatgtggactacctgagcaacctggaattctggggccagggaacagccgtgacagtgtctagtgcttccacaaagggccctagcgtgttccctctggctcctagcagcaagtctacaagcggaggaacagctgccctgggctgcctggtggaagattactttcctgagcctgtgaccgtgtcctggaacagcggtgctctgacttctggcgtgcacacctttccagccgtgctgcaaagcagcggcctgtactctctgagcagcgtggtcacagtgccaagctctagcctgggcacccagacctacatctgcaatgtgaaccacaagcctagcaacaccaaggtggacgacaaggtggaacccaagagctgcgacaagacccacacctgtcctccatgtcctgctccagaactgctggccggaccttccgtgttcctgtttcctccaaagcctaaggacaccctgatgatcagcagaacccctgaagtgacctgcgtggtggtggatgtgtctcacgaggaccccgaagtgaagttcaattggtacgtggacggcgtggaagtgcacaatgccaagaccaagcctagagaggaacagtacaacagcacctacagagtggtgtccgtgctgaccgtgctgcaccaggattggctgaacggcaaagagtacaagtgcaaggtgtccaacaaggccctgcctctgcctgaggaaaagaccatcagcaaggccaagggccagcctagggaaccccaggtttacaccctgcctccatgccgcgaggaaatgaccaagaaccaggtgtccctgtggtgcctcgtgaagggcttctacccttccgatatcgccgtggaatgggagagcaatggccagcctgagaacaactacaagacaacccctcctgtgctggacagcgacggctcattcttcctgtacagcaagctgaccgtggacaagtccagatggcagcagggcaacgtgttcagctgtagcgtgctgcacgaagccctgcacagccactacacccagaagtccctgtctctgagccccggcaagtgataaggatccgatctggtactgcatgcacgcaatgctagctgcccctttcccgtcctgggtaccccgagtctcccccgacctcgggtcccaggtatgctcccacctccacctgccccactcaccacctctgctagttccagacacctcccaagcacgcagcaatgcagctcaaaacgcttagcctagccacacccccacgggaaacagcagtgattaacctttagcaataaacgaaagtttaactaagctatactaaccccagggttggtcaatttcgtgccagccacaccctcgagctagcaaaaaaaaaaaaaaaaaaaaaaaaaaaaaagcatatgactaaaaaaaaaaaaaaaaaaaaaaaaaaaaaaaaaaaaaaaaaaaaaaaaaaaaaaaaaaaaaaaaaaaaaa

SEQ ID NO: 978 - RNA, 1937 nt, synthetic construct
  source 1..1937: mol_type = other RNA
agaataaactagtattcttctggtccccacagactcagagagaacccgccaccatggattggatctggcgcatcctgtttctcgtgggagctgccacaggcgcccactctcaagttcacctgacacagtctggccccgaagtgcggaagcctggcacaagcgtgaaggtgtcctgtaaagcccctggcaacaccctgaaaacctacgacctgcactgggtccgatctgtgcctggacaaggactgcagtggatgggctggattagccacgagggcgacaagaaagtgatcgtggaacggttcaaggccaaagtgaccatcgactgggacagaagcaccaacaccgcctacctgcagctgagcggactgacatctggcgataccgccgtgtactactgtgccaagggcagcaagcaccggctgagagattacgccctgtacgacgatgacggcgccctgaattgggccgtcgatgtggactacctgagcaacctggaattctggggccagggaacagccgtgacagtgtctagtgcttccacaaagggccctagcgtgttccctctggctcctagcagcaagtctacaagcggaggaacagctgccctgggctgcctggtggaagattactttcctgagcctgtgaccgtgtcctggaacagcggtgctctgacttctggcgtgcacacctttccagccgtgctgcaaagcagcggcctgtactctctgagcagcgtggtcacagtgccaagctctagcctgggcacccagacctacatctgcaatgtgaaccacaagcctagcaacaccaaggtggacgacaaggtggaacccaagagctgcgacaagacccacacctgtcctccatgtcctgctccagaactgctggccggaccttccgtgttcctgtttcctccaaagcctaaggacaccctgatgatcagcagaacccctgaagtgacctgcgtggtggtggatgtgtctcacgaggaccctgaagtgaagttcaattggtacgtggacggcgtggaagtgcacaacgccaagaccaagcctagagaggaacagtacaacagcacctacagagtggtgtccgtgctgaccgtgctgcaccaggattggctgaacggcaaagagtacaagtgcaaggtgtccaacaaggccctgcctgcccctgaggaaaagaccatcagcaaggccaagggccagcctagggaaccccaggtttacaccctgcctccatgccgcgaggaaatgaccaagaaccaggtgtccctgtggtgcctcgtgaagggcttctacccttccgatatcgccgtggaatgggagagcaatggccagcctgagaacaactacaagacaacccctcctgtgctggacagcgacggctcattcttcctgtacagcaagctgaccgtggacaagtccagatggcagcagggcaacgtgttcagctgtagcgtgctgcacgaagccctgcacagccactacacccagaagtccctgtctctgagccccggcaagtgataaggatccgatctggtactgcatgcacgcaatgctagctgcccctttcccgtcctgggtaccccgagtctcccccgacctcgggtcccaggtatgctcccacctccacctgccccactcaccacctctgctagttccagacacctcccaagcacgcagcaatgcagctcaaaacgcttagcctagccacacccccacgggaaacagcagtgattaacctttagcaataaacgaaagtttaactaagctatactaaccccagggttggtcaatttcgtgccagccacaccctcgagctagcaaaaaaaaaaaaaaaaaaaaaaaaaaaaaagcatatgactaaaaaaaaaaaaaaaaaaaaaaaaaaaaaaaaaaaaaaaaaaaaaaaaaaaaaaaaaaaaaaaaaaaaaa

SEQ ID NO: 979 - RNA, 1937 nt, synthetic construct
  source 1..1937: mol_type = other RNA
agaataaactagtattcttctggtccccacagactcagagagaacccgccaccatggattggatctggcgcatcctgtttctcgtgggagctgccacaggcgcccactctcaagttcacctgacacagtctggccccgaagtgcggaagcctggcacaagcgtgaaggtgtcctgtaaagcccctggcaacaccctgaaaacctacgacctgcactgggtccgatctgtgcctggacaaggactgcagtggatgggctggattagccacgagggcgacaagaaagtgatcgtggaacggttcaaggccaaagtgaccatcgactgggacagaagcaccaacaccgcctacctgcagctgagcggactgacatctggcgataccgccgtgtactactgtgccaagggcagcaagcaccggctgagagattacgccctgtacgacgatgacggcgccctgaattgggccgtcgatgtggactacctgagcaacctggaattctggggccagggaacagccgtgacagtgtctagtgcttccacaaagggccctagcgtgttccctctggctcctagcagcaagtctacaagcggaggaacagctgccctgggctgcctggtggaagattactttcctgagcctgtgaccgtgtcctggaacagcggtgctctgacttctggcgtgcacacctttccagccgtgctgcaaagcagcggcctgtactctctgagcagcgtggtcacagtgccaagctctagcctgggcacccagacctacatctgcaatgtgaaccacaagcctagcaacaccaaggtggacgacaaggtggaacccaagagctgcgacaagacccacacctgtcctccatgtcctgctccagaactgctggccggaccttccgtgttcctgtttcctccaaagcctaaggacaccctgatgatcagcagaacccctgaagtgacctgcgtggtggtggatgtgtctcacgaggaccctgaagtgaagttcaattggtacgtggacggcgtggaagtgcacaacgccaagaccaagcctagagaggaacagtacaacagcacctacagagtggtgtccgtgctgaccgtgctgcaccaggattggctgaacggcaaagagtacaagtgcaaggtgtccaacaaggccctgcctgcccctatcgaaaagaccatcagcaaggccaagggccagcctagggaaccccaggtttacaccctgcctccatgccgcgaggaaatgaccaagaaccaggtgtccctgtggtgcctcgtgaagggcttctacccttccgatatcgccgtggaatgggagagcaatggccagcctgagaacaactacaagacaacccctcctgtgctggacagcgacggctcattcttcctgtacagcaagctgaccgtggacaagtccagatggcagcagggcaacgtgttcagctgtagcgtgctgcacgaagccctgcacagccactacacccagaagtccctgtctctgagccccggcaagtgataaggatccgatctggtactgcatgcacgcaatgctagctgcccctttcccgtcctgggtaccccgagtctcccccgacctcgggtcccaggtatgctcccacctccacctgccccactcaccacctctgctagttccagacacctcccaagcacgcagcaatgcagctcaaaacgcttagcctagccacacccccacgggaaacagcagtgattaacctttagcaataaacgaaagtttaactaagctatactaaccccagggttggtcaatttcgtgccagccacaccctcgagctagcaaaaaaaaaaaaaaaaaaaaaaaaaaaaaagcatatgactaaaaaaaaaaaaaaaaaaaaaaaaaaaaaaaaaaaaaaaaaaaaaaaaaaaaaaaaaaaaaaaaaaaaaa

SEQ ID NO: 980 - RNA, 1937 nt, synthetic construct
  source 1..1937: mol_type = other RNA
agaataaactagtattcttctggtccccacagactcagagagaacccgccaccatggattggatctggcgcatcctgtttctcgtgggagctgccacaggcgcccactctcaagttcacctgacacagtctggccccgaagtgcggaagcctggcacaagcgtgaaggtgtcctgtaaagcccctggcaacaccctgaaaacctacgacctgcactgggtccgatctgtgcctggacaaggactgcagtggatgggctggattagccacgagggcgacaagaaagtgatcgtggaacggttcaaggccaaagtgaccatcgactgggacagaagcaccaacaccgcctacctgcagctgagcggactgacatctggcgataccgccgtgtactactgtgccaagggcagcaagcaccggctgagagattacgccctgtacgacgatgacggcgccctgaattgggccgtcgatgtggactacctgagcaacctggaattctggggccagggaacagccgtgacagtgtctagtgcttccacaaagggccctagcgtgttccctctggctcctagcagcaagtctacaagcggaggaacagctgccctgggctgcctggtggaagattactttcctgagcctgtgaccgtgtcctggaacagcggtgctctgacttctggcgtgcacacctttccagccgtgctgcaaagcagcggcctgtactctctgagcagcgtggtcacagtgccaagctctagcctgggcacccagacctacatctgcaatgtgaaccacaagcctagcaacaccaaggtggacgacaaggtggaacccaagagctgcgacaagacccacacctgtcctccatgtcctgctccagaactgctgggcggaccttccgtgttcctgtttcctccaaagcctaaggacaccctgatgatcagcagaacccctgaagtgacctgcgtggtggtggatgtgtctcacgaggaccctgaagtgaagttcaattggtacgtggacggcgtggaagtgcacaacgccaagaccaagcctagagaggaacagtacaacagcacctacagagtggtgtccgtgctgaccgtgctgcaccaggattggctgaacggcaaagagtacaagtgcaaggtgtccaacaaggccctgcctgcccctgaggaaaagaccatcagcaaggccaagggccagcctagggaaccccaggtttacaccctgcctccatgccgcgaggaaatgaccaagaaccaggtgtccctgtggtgcctcgtgaagggcttctacccttccgatatcgccgtggaatgggagagcaatggccagcctgagaacaactacaagacaacccctcctgtgctggacagcgacggctcattcttcctgtacagcaagctgaccgtggacaagtccagatggcagcagggcaacgtgttcagctgtagcgtgctgcacgaagccctgcacagccactacacccagaagtccctgtctctgagccccggcaagtgataaggatccgatctggtactgcatgcacgcaatgctagctgcccctttcccgtcctgggtaccccgagtctcccccgacctcgggtcccaggtatgctcccacctccacctgccccactcaccacctctgctagttccagacacctcccaagcacgcagcaatgcagctcaaaacgcttagcctagccacacccccacgggaaacagcagtgattaacctttagcaataaacgaaagtttaactaagctatactaaccccagggttggtcaatttcgtgccagccacaccctcgagctagcaaaaaaaaaaaaaaaaaaaaaaaaaaaaaagcatatgactaaaaaaaaaaaaaaaaaaaaaaaaaaaaaaaaaaaaaaaaaaaaaaaaaaaaaaaaaaaaaaaaaaaaaa

SEQ ID NO: 981 - RNA, 1937 nt, synthetic construct
  source 1..1937: mol_type = other RNA
agaataaactagtattcttctggtccccacagactcagagagaacccgccaccatggattggatctggcgcatcctgtttctcgtgggagctgccacaggcgcccactctcaagttcacctgacacagtctggccccgaagtgcggaagcctggcacaagcgtgaaggtgtcctgtaaagcccctggcaacaccctgaaaacctacgacctgcactgggtccgatctgtgcctggacaaggactgcagtggatgggctggattagccacgagggcgacaagaaagtgatcgtggaacggttcaaggccaaagtgaccatcgactgggacagaagcaccaacaccgcctacctgcagctgagcggactgacatctggcgataccgccgtgtactactgtgccaagggcagcaagcaccggctgagagattacgccctgtacgacgatgacggcgccctgaattgggccgtcgatgtggactacctgagcaacctggaattctggggccagggaacagccgtgacagtgtctagtgcttccacaaagggccctagcgtgttccctctggctcctagcagcaagtctacaagcggaggaacagctgccctgggctgcctggtggaagattactttcctgagcctgtgaccgtgtcctggaacagcggtgctctgacttctggcgtgcacacctttccagccgtgctgcaaagcagcggcctgtactctctgagcagcgtggtcacagtgccaagctctagcctgggcacccagacctacatctgcaatgtgaaccacaagcctagcaacaccaaggtggacgacaaggtggaacccaagagctgcgacaagacccacacctgtcctccatgtcctgctccagaactgctcggcggaccttccgtgttcctgtttcctccaaagcctaaggacaccctgatgatcagcagaacccctgaagtgacctgcgtggtggtggatgtgtctcacgaggaccccgaagtgaagttcaattggtacgtggacggcgtggaagtgcacaacgccaagaccaagcctagagaggaacagtacaacagcacctacagagtggtgtccgtgctgacagtgctgcaccaggattggctgaacggcaaagagtacaagtgcaaggtgtccaacaaggccctgcctgctcctatcgagaaaaccatcagcaaggccaagggccagcctagggaaccccaggtttacacactgcctccaagccgcgacgaactgaccaagaaccaggtgtccctgacctgcctcgtgaagggcttctacccttccgatatcgccgtggaatgggagagcaatggccagcctgagaacaactacaagacaacccctcctgtgctggacagcgacggctcattcttcctgtacagcaagctgactgtggataagtcccggtggcagcagggcaacgtgttcagctgttctgtgatgcacgaagccctgcacaaccactacacccagaaaagcctgtctctgagccccggcaagtgataaggatccgatctggtactgcatgcacgcaatgctagctgcccctttcccgtcctgggtaccccgagtctcccccgacctcgggtcccaggtatgctcccacctccacctgccccactcaccacctctgctagttccagacacctcccaagcacgcagcaatgcagctcaaaacgcttagcctagccacacccccacgggaaacagcagtgattaacctttagcaataaacgaaagtttaactaagctatactaaccccagggttggtcaatttcgtgccagccacaccctcgagctagcaaaaaaaaaaaaaaaaaaaaaaaaaaaaaagcatatgactaaaaaaaaaaaaaaaaaaaaaaaaaaaaaaaaaaaaaaaaaaaaaaaaaaaaaaaaaaaaaaaaaaaaaa

SEQ ID NO: 982 - RNA, 1937 nt, synthetic construct
  source 1..1937: mol_type = other RNA
agaataaactagtattcttctggtccccacagactcagagagaacccgccaccatggattggatctggcgcatcctgtttctcgtgggagctgccacaggcgcccactctcaagttcacctgacacagtctggccccgaagtgcggaagcctggcacaagcgtgaaggtgtcctgtaaagcccctggcaacaccctgaaaacctacgacctgcactgggtccgatctgtgcctggacaaggactgcagtggatgggctggattagccacgagggcgacaagaaagtgatcgtggaacggttcaaggccaaagtgaccatcgactgggacagaagcaccaacaccgcctacctgcagctgagcggactgacatctggcgataccgccgtgtactactgtgccaagggcagcaagcaccggctgagagattacgccctgtacgacgatgacggcgccctgaattgggccgtcgatgtggactacctgagcaacctggaattctggggccagggaacagccgtgacagtgtctagtgcttccacaaagggccctagcgtgttccctctggctcctagcagcaagtctacaagcggaggaacagctgccctgggctgcctggtggaagattactttcctgagcctgtgaccgtgtcctggaacagcggtgctctgacttctggcgtgcacacctttccagccgtgctgcaaagcagcggcctgtactctctgagcagcgtggtcacagtgccaagctctagcctgggcacccagacctacatctgcaatgtgaaccacaagcctagcaacaccaaggtggacgacaaggtggaacccaagagctgcgacaagacccacacctgtcctccatgtcctgctccagaactgctcggcggaccttccgtgttcctgtttcctccaaagcctaaggacaccctgatgatcagcagaacccctgaagtgacctgcgtggtggtggatgtgtctcacgaggaccccgaagtgaagttcaattggtacgtggacggcgtggaagtgcacaacgccaagaccaagcctagagaggaacagtacaacagcacctacagagtggtgtccgtgctgacagtgctgcaccaggattggctgaacggcaaagagtacaagtgcaaggtgtccaacaaggccctgcctgctcctatcgagaaaaccatcagcaaggccaagggccagcctagggaaccccaggtttacacactgcctccaagccgcgacgaactgaccaagaaccaggtgtccctgacctgcctcgtgaagggcttctacccttccgatatcgccgtggaatgggagagcaatggccagcctgagaacaactacaagacaacccctcctgtgctggacagcgacggctcattcttcctgtacagcaagctgaccgtggacaagtccagatggcagcagggcaacgtgttcagctgtagcgtgctgcacgaagccctgcacagccactacacccagaaaagcctgtctctgagccccggcaaatgataaggatccgatctggtactgcatgcacgcaatgctagctgcccctttcccgtcctgggtaccccgagtctcccccgacctcgggtcccaggtatgctcccacctccacctgccccactcaccacctctgctagttccagacacctcccaagcacgcagcaatgcagctcaaaacgcttagcctagccacacccccacgggaaacagcagtgattaacctttagcaataaacgaaagtttaactaagctatactaaccccagggttggtcaatttcgtgccagccacaccctcgagctagcaaaaaaaaaaaaaaaaaaaaaaaaaaaaaagcatatgactaaaaaaaaaaaaaaaaaaaaaaaaaaaaaaaaaaaaaaaaaaaaaaaaaaaaaaaaaaaaaaaaaaaaaa

SEQ ID NO: 983 - RNA, 1937 nt, synthetic construct
  source 1..1937: mol_type = other RNA
agaataaactagtattcttctggtccccacagactcagagagaacccgccaccatggattggatctggcgcatcctgtttctcgtgggagctgccacaggcgcccactctcaagttcacctgacacagtctggccccgaagtgcggaagcctggcacaagcgtgaaggtgtcctgtaaagcccctggcaacaccctgaaaacctacgacctgcactgggtccgatctgtgcctggacaaggactgcagtggatgggctggattagccacgagggcgacaagaaagtgatcgtggaacggttcaaggccaaagtgaccatcgactgggacagaagcaccaacaccgcctacctgcagctgagcggactgacatctggcgataccgccgtgtactactgtgccaagggcagcaagcaccggctgagagattacgccctgtacgacgatgacggcgccctgaattgggccgtcgatgtggactacctgagcaacctggaattctggggccagggaacagccgtgacagtgtctagtgcttccacaaagggccctagcgtgttccctctggctcctagcagcaagtctacaagcggaggaacagctgccctgggctgcctggtggaagattactttcctgagcctgtgaccgtgtcctggaacagcggtgctctgacttctggcgtgcacacctttccagccgtgctgcaaagcagcggcctgtactctctgagcagcgtggtcacagtgccaagctctagcctgggcacccagacctacatctgcaatgtgaaccacaagcctagcaacaccaaggtggacgacaaggtggaacccaagagctgcgacaagacccacacctgtcctccatgtcctgctccagaactgctggccggaccttccgtgttcctgtttcctccaaagcctaaggacaccctgatgatcagcagaacccctgaagtgacctgcgtggtggtggatgtgtctcacgaggaccccgaagtgaagttcaattggtacgtggacggcgtggaagtgcacaatgccaagaccaagcctagagaggaacagtacaacagcacctacagagtggtgtccgtgctgaccgtgctgcaccaggattggctgaacggcaaagagtacaagtgcaaggtgtccaacaaggccctgcctctgcctgaggaaaagaccatcagcaaggccaagggccagcctagggaaccccaggtttacacactgcctccaagccgcgacgaactgaccaagaaccaggtgtccctgacctgcctcgtgaagggcttctacccttccgatatcgccgtggaatgggagagcaatggccagcctgagaacaactacaagacaacccctcctgtgctggacagcgacggctcattcttcctgtacagcaagctgaccgtggacaagtccagatggcagcagggcaacgtgttcagctgtagcgtgctgcacgaagccctgcacagccactacacccagaaaagcctgtctctgagccccggcaaatgataaggatccgatctggtactgcatgcacgcaatgctagctgcccctttcccgtcctgggtaccccgagtctcccccgacctcgggtcccaggtatgctcccacctccacctgccccactcaccacctctgctagttccagacacctcccaagcacgcagcaatgcagctcaaaacgcttagcctagccacacccccacgggaaacagcagtgattaacctttagcaataaacgaaagtttaactaagctatactaaccccagggttggtcaatttcgtgccagccacaccctcgagctagcaaaaaaaaaaaaaaaaaaaaaaaaaaaaaagcatatgactaaaaaaaaaaaaaaaaaaaaaaaaaaaaaaaaaaaaaaaaaaaaaaaaaaaaaaaaaaaaaaaaaaaaaa

SEQ ID NO: 984 - RNA, 1937 nt, synthetic construct
  source 1..1937: mol_type = other RNA
agaataaactagtattcttctggtccccacagactcagagagaacccgccaccatggattggatctggcgcatcctgtttctcgtgggagctgccacaggcgcccactctcaagttcacctgacacagtctggccccgaagtgcggaagcctggcacaagcgtgaaggtgtcctgtaaagcccctggcaacaccctgaaaacctacgacctgcactgggtccgatctgtgcctggacaaggactgcagtggatgggctggattagccacgagggcgacaagaaagtgatcgtggaacggttcaaggccaaagtgaccatcgactgggacagaagcaccaacaccgcctacctgcagctgagcggactgacatctggcgataccgccgtgtactactgtgccaagggcagcaagcaccggctgagagattacgccctgtacgacgatgacggcgccctgaattgggccgtcgatgtggactacctgagcaacctggaattctggggccagggaacagccgtgacagtgtctagtgcttccacaaagggccctagcgtgttccctctggctcctagcagcaagtctacaagcggaggaacagctgccctgggctgcctggtggaagattactttcctgagcctgtgaccgtgtcctggaacagcggtgctctgacttctggcgtgcacacctttccagccgtgctgcaaagcagcggcctgtactctctgagcagcgtggtcacagtgccaagctctagcctgggcacccagacctacatctgcaatgtgaaccacaagcctagcaacaccaaggtggacgacaaggtggaacccaagagctgcgacaagacccacacctgtcctccatgtcctgctccagaactgctggccggaccttccgtgttcctgtttcctccaaagcctaaggacaccctgatgatcagcagaacccctgaagtgacctgcgtggtggtggatgtgtctcacgaggaccctgaagtgaagttcaattggtacgtggacggcgtggaagtgcacaacgccaagaccaagcctagagaggaacagtacaacagcacctacagagtggtgtccgtgctgaccgtgctgcaccaggattggctgaacggcaaagagtacaagtgcaaggtgtccaacaaggccctgcctgcccctgaggaaaagaccatcagcaaggccaagggccagcctagggaaccccaggtttacacactgcctccaagccgcgacgaactgaccaagaaccaggtgtccctgacctgcctcgtgaagggcttctacccttccgatatcgccgtggaatgggagagcaatggccagcctgagaacaactacaagacaacccctcctgtgctggacagcgacggctcattcttcctgtacagcaagctgaccgtggacaagtccagatggcagcagggcaacgtgttcagctgtagcgtgctgcacgaagccctgcacagccactacacccagaaaagcctgtctctgagccccggcaaatgataaggatccgatctggtactgcatgcacgcaatgctagctgcccctttcccgtcctgggtaccccgagtctcccccgacctcgggtcccaggtatgctcccacctccacctgccccactcaccacctctgctagttccagacacctcccaagcacgcagcaatgcagctcaaaacgcttagcctagccacacccccacgggaaacagcagtgattaacctttagcaataaacgaaagtttaactaagctatactaaccccagggttggtcaatttcgtgccagccacaccctcgagctagcaaaaaaaaaaaaaaaaaaaaaaaaaaaaaagcatatgactaaaaaaaaaaaaaaaaaaaaaaaaaaaaaaaaaaaaaaaaaaaaaaaaaaaaaaaaaaaaaaaaaaaaaa

SEQ ID NO: 985 - RNA, 1937 nt, synthetic construct
  source 1..1937: mol_type = other RNA
agaataaactagtattcttctggtccccacagactcagagagaacccgccaccatggattggatctggcgcatcctgtttctcgtgggagctgccacaggcgcccactctcaagttcacctgacacagtctggccccgaagtgcggaagcctggcacaagcgtgaaggtgtcctgtaaagcccctggcaacaccctgaaaacctacgacctgcactgggtccgatctgtgcctggacaaggactgcagtggatgggctggattagccacgagggcgacaagaaagtgatcgtggaacggttcaaggccaaagtgaccatcgactgggacagaagcaccaacaccgcctacctgcagctgagcggactgacatctggcgataccgccgtgtactactgtgccaagggcagcaagcaccggctgagagattacgccctgtacgacgatgacggcgccctgaattgggccgtcgatgtggactacctgagcaacctggaattctggggccagggaacagccgtgacagtgtctagtgcttccacaaagggccctagcgtgttccctctggctcctagcagcaagtctacaagcggaggaacagctgccctgggctgcctggtggaagattactttcctgagcctgtgaccgtgtcctggaacagcggtgctctgacttctggcgtgcacacctttccagccgtgctgcaaagcagcggcctgtactctctgagcagcgtggtcacagtgccaagctctagcctgggcacccagacctacatctgcaatgtgaaccacaagcctagcaacaccaaggtggacgacaaggtggaacccaagagctgcgacaagacccacacctgtcctccatgtcctgctccagaactgctggccggaccttccgtgttcctgtttcctccaaagcctaaggacaccctgatgatcagcagaacccctgaagtgacctgcgtggtggtggatgtgtctcacgaggaccctgaagtgaagttcaattggtacgtggacggcgtggaagtgcacaacgccaagaccaagcctagagaggaacagtacaacagcacctacagagtggtgtccgtgctgaccgtgctgcaccaggattggctgaacggcaaagagtacaagtgcaaggtgtccaacaaggccctgcctgcccctatcgaaaagaccatcagcaaggccaagggccagcctagggaaccccaggtttacacactgcctccaagccgcgacgaactgaccaagaaccaggtgtccctgacctgcctcgtgaagggcttctacccttccgatatcgccgtggaatgggagagcaatggccagcctgagaacaactacaagacaacccctcctgtgctggacagcgacggctcattcttcctgtacagcaagctgaccgtggacaagtccagatggcagcagggcaacgtgttcagctgtagcgtgctgcacgaagccctgcacagccactacacccagaaaagcctgtctctgagccccggcaaatgataaggatccgatctggtactgcatgcacgcaatgctagctgcccctttcccgtcctgggtaccccgagtctcccccgacctcgggtcccaggtatgctcccacctccacctgccccactcaccacctctgctagttccagacacctcccaagcacgcagcaatgcagctcaaaacgcttagcctagccacacccccacgggaaacagcagtgattaacctttagcaataaacgaaagtttaactaagctatactaaccccagggttggtcaatttcgtgccagccacaccctcgagctagcaaaaaaaaaaaaaaaaaaaaaaaaaaaaaagcatatgactaaaaaaaaaaaaaaaaaaaaaaaaaaaaaaaaaaaaaaaaaaaaaaaaaaaaaaaaaaaaaaaaaaaaaa

SEQ ID NO: 986 - RNA, 1937 nt, synthetic construct
  source 1..1937: mol_type = other RNA
agaataaactagtattcttctggtccccacagactcagagagaacccgccaccatggattggatctggcgcatcctgtttctcgtgggagctgccacaggcgcccactctcaagttcacctgacacagtctggccccgaagtgcggaagcctggcacaagcgtgaaggtgtcctgtaaagcccctggcaacaccctgaaaacctacgacctgcactgggtccgatctgtgcctggacaaggactgcagtggatgggctggattagccacgagggcgacaagaaagtgatcgtggaacggttcaaggccaaagtgaccatcgactgggacagaagcaccaacaccgcctacctgcagctgagcggactgacatctggcgataccgccgtgtactactgtgccaagggcagcaagcaccggctgagagattacgccctgtacgacgatgacggcgccctgaattgggccgtcgatgtggactacctgagcaacctggaattctggggccagggaacagccgtgacagtgtctagtgcttccacaaagggccctagcgtgttccctctggctcctagcagcaagtctacaagcggaggaacagctgccctgggctgcctggtggaagattactttcctgagcctgtgaccgtgtcctggaacagcggtgctctgacttctggcgtgcacacctttccagccgtgctgcaaagcagcggcctgtactctctgagcagcgtggtcacagtgccaagctctagcctgggcacccagacctacatctgcaatgtgaaccacaagcctagcaacaccaaggtggacgacaaggtggaacccaagagctgcgacaagacccacacctgtcctccatgtcctgctccagaactgctgggcggaccttccgtgttcctgtttcctccaaagcctaaggacaccctgatgatcagcagaacccctgaagtgacctgcgtggtggtggatgtgtctcacgaggaccctgaagtgaagttcaattggtacgtggacggcgtggaagtgcacaacgccaagaccaagcctagagaggaacagtacaacagcacctacagagtggtgtccgtgctgaccgtgctgcaccaggattggctgaacggcaaagagtacaagtgcaaggtgtccaacaaggccctgcctgcccctgaggaaaagaccatcagcaaggccaagggccagcctagggaaccccaggtttacacactgcctccaagccgcgacgaactgaccaagaaccaggtgtccctgacctgcctcgtgaagggcttctacccttccgatatcgccgtggaatgggagagcaatggccagcctgagaacaactacaagacaacccctcctgtgctggacagcgacggctcattcttcctgtacagcaagctgaccgtggacaagtccagatggcagcagggcaacgtgttcagctgtagcgtgctgcacgaagccctgcacagccactacacccagaaaagcctgtctctgagccccggcaaatgataaggatccgatctggtactgcatgcacgcaatgctagctgcccctttcccgtcctgggtaccccgagtctcccccgacctcgggtcccaggtatgctcccacctccacctgccccactcaccacctctgctagttccagacacctcccaagcacgcagcaatgcagctcaaaacgcttagcctagccacacccccacgggaaacagcagtgattaacctttagcaataaacgaaagtttaactaagctatactaaccccagggttggtcaatttcgtgccagccacaccctcgagctagcaaaaaaaaaaaaaaaaaaaaaaaaaaaaaagcatatgactaaaaaaaaaaaaaaaaaaaaaaaaaaaaaaaaaaaaaaaaaaaaaaaaaaaaaaaaaaaaaaaaaaaaaa

SEQ ID NO: 987 - RNA, 1937 nt, synthetic construct
  source 1..1937: mol_type = other RNA
agaataaactagtattcttctggtccccacagactcagagagaacccgccaccatggattggatctggcgcatcctgtttctcgtgggagctgccacaggcgcccactctcaagttcacctgacacagtctggccccgaagtgcggaagcctggcacaagcgtgaaggtgtcctgtaaagcccctggcaacaccctgaaaacctacgacctgcactgggtccgatctgtgcctggacaaggactgcagtggatgggctggattagccacgagggcgacaagaaagtgatcgtggaacggttcaaggccaaagtgaccatcgactgggacagaagcaccaacaccgcctacctgcagctgagcggactgacatctggcgataccgccgtgtactactgtgccaagggcagcaagcaccggctgagagattacgccctgtacgacgatgacggcgccctgaattgggccgtcgatgtggactacctgagcaacctggaattctggggccagggaacagccgtgacagtgtctagtgcttccacaaagggccctagcgtgttccctctggctcctagcagcaagtctacaagcggaggaacagctgccctgggctgcctggtggaagattactttcctgagcctgtgaccgtgtcctggaacagcggtgctctgacttctggcgtgcacacctttccagccgtgctgcaaagcagcggcctgtactctctgagcagcgtggtcacagtgccaagctctagcctgggcacccagacctacatctgcaatgtgaaccacaagcctagcaacaccaaggtggacgacaaggtggaacccaagagctgcgacaagacccacacctgtcctccatgtcctgctccagaactgctcggcggaccttccgtgttcctgtttcctccaaagcctaaggacaccctgatgatcagcagaacccctgaagtgacctgcgtggtggtggatgtgtctcacgaggaccccgaagtgaagttcaattggtacgtggacggcgtggaagtgcacaacgccaagaccaagcctagagaggaacagtacaacagcacctacagagtggtgtccgtgctgacagtgctgcaccaggattggctgaacggcaaagagtacaagtgcaaggtgtccaacaaggccctgcctgctcctatcgagaaaaccatcagcaaggccaagggccagcctcgcgaacctcaagtctgtacactgcctcctagccgcgacgaactgaccaagaaccaggtgtccctgagctgcgccgtgaagggcttttacccttccgatatcgccgtggaatgggagagcaatggccagcctgagaacaactacaagacaacccctcctgtgctggacagcgacggctcattcttcctggtgtccaagctgacagtggacaagagcagatggcagcagggcaacgtgttcagctgcagcgtgctgcatgaagccctgcacagccactacacccagaagtccctgtctctgagccccggcaagtgataaggatccgatctggtactgcatgcacgcaatgctagctgcccctttcccgtcctgggtaccccgagtctcccccgacctcgggtcccaggtatgctcccacctccacctgccccactcaccacctctgctagttccagacacctcccaagcacgcagcaatgcagctcaaaacgcttagcctagccacacccccacgggaaacagcagtgattaacctttagcaataaacgaaagtttaactaagctatactaaccccagggttggtcaatttcgtgccagccacaccctcgagctagcaaaaaaaaaaaaaaaaaaaaaaaaaaaaaagcatatgactaaaaaaaaaaaaaaaaaaaaaaaaaaaaaaaaaaaaaaaaaaaaaaaaaaaaaaaaaaaaaaaaaaaaaa

SEQ ID NO: 988 - RNA, 1937 nt, synthetic construct
  source 1..1937: mol_type = other RNA
agaataaactagtattcttctggtccccacagactcagagagaacccgccaccatggattggatctggcgcatcctgtttctcgtgggagctgccacaggcgcccactctcaagttcacctgacacagtctggccccgaagtgcggaagcctggcacaagcgtgaaggtgtcctgtaaagcccctggcaacaccctgaaaacctacgacctgcactgggtccgatctgtgcctggacaaggactgcagtggatgggctggattagccacgagggcgacaagaaagtgatcgtggaacggttcaaggccaaagtgaccatcgactgggacagaagcaccaacaccgcctacctgcagctgagcggactgacatctggcgataccgccgtgtactactgtgccaagggcagcaagcaccggctgagagattacgccctgtacgacgatgacggcgccctgaattgggccgtcgatgtggactacctgagcaacctggaattctggggccagggaacagccgtgacagtgtctagtgcttccacaaagggccctagcgtgttccctctggctcctagcagcaagtctacaagcggaggaacagctgccctgggctgcctggtggaagattactttcctgagcctgtgaccgtgtcctggaacagcggtgctctgacttctggcgtgcacacctttccagccgtgctgcaaagcagcggcctgtactctctgagcagcgtggtcacagtgccaagctctagcctgggcacccagacctacatctgcaatgtgaaccacaagcctagcaacaccaaggtggacgacaaggtggaacccaagagctgcgacaagacccacacctgtcctccatgtcctgctccagaactgctggccggaccttccgtgttcctgtttcctccaaagcctaaggacaccctgatgatcagcagaacccctgaagtgacctgcgtggtggtggatgtgtctcacgaggaccccgaagtgaagttcaattggtacgtggacggcgtggaagtgcacaatgccaagaccaagcctagagaggaacagtacaacagcacctacagagtggtgtccgtgctgaccgtgctgcaccaggattggctgaacggcaaagagtacaagtgcaaggtgtccaacaaggccctgcctctgcctgaggaaaagaccatcagcaaggccaagggccagcctcgcgaacctcaagtctgtacactgcctcctagccgcgacgaactgaccaagaaccaggtgtccctgagctgcgccgtgaagggcttttacccttccgatatcgccgtggaatgggagagcaatggccagcctgagaacaactacaagacaacccctcctgtgctggacagcgacggctcattcttcctggtgtccaagctgacagtggacaagagcagatggcagcagggcaacgtgttcagctgcagcgtgctgcatgaagccctgcacagccactacacccagaagtccctgtctctgagccccggcaagtgataaggatccgatctggtactgcatgcacgcaatgctagctgcccctttcccgtcctgggtaccccgagtctcccccgacctcgggtcccaggtatgctcccacctccacctgccccactcaccacctctgctagttccagacacctcccaagcacgcagcaatgcagctcaaaacgcttagcctagccacacccccacgggaaacagcagtgattaacctttagcaataaacgaaagtttaactaagctatactaaccccagggttggtcaatttcgtgccagccacaccctcgagctagcaaaaaaaaaaaaaaaaaaaaaaaaaaaaaagcatatgactaaaaaaaaaaaaaaaaaaaaaaaaaaaaaaaaaaaaaaaaaaaaaaaaaaaaaaaaaaaaaaaaaaaaaa

SEQ ID NO: 989 - RNA, 1937 nt, synthetic construct
  source 1..1937: mol_type = other RNA
agaataaactagtattcttctggtccccacagactcagagagaacccgccaccatggattggatctggcgcatcctgtttctcgtgggagctgccacaggcgcccactctcaagttcacctgacacagtctggccccgaagtgcggaagcctggcacaagcgtgaaggtgtcctgtaaagcccctggcaacaccctgaaaacctacgacctgcactgggtccgatctgtgcctggacaaggactgcagtggatgggctggattagccacgagggcgacaagaaagtgatcgtggaacggttcaaggccaaagtgaccatcgactgggacagaagcaccaacaccgcctacctgcagctgagcggactgacatctggcgataccgccgtgtactactgtgccaagggcagcaagcaccggctgagagattacgccctgtacgacgatgacggcgccctgaattgggccgtcgatgtggactacctgagcaacctggaattctggggccagggaacagccgtgacagtgtctagtgcttccacaaagggccctagcgtgttccctctggctcctagcagcaagtctacaagcggaggaacagctgccctgggctgcctggtggaagattactttcctgagcctgtgaccgtgtcctggaacagcggtgctctgacttctggcgtgcacacctttccagccgtgctgcaaagcagcggcctgtactctctgagcagcgtggtcacagtgccaagctctagcctgggcacccagacctacatctgcaatgtgaaccacaagcctagcaacaccaaggtggacgacaaggtggaacccaagagctgcgacaagacccacacctgtcctccatgtcctgctccagaactgctggccggaccttccgtgttcctgtttcctccaaagcctaaggacaccctgatgatcagcagaacccctgaagtgacctgcgtggtggtggatgtgtctcacgaggaccctgaagtgaagttcaattggtacgtggacggcgtggaagtgcacaacgccaagaccaagcctagagaggaacagtacaacagcacctacagagtggtgtccgtgctgaccgtgctgcaccaggattggctgaacggcaaagagtacaagtgcaaggtgtccaacaaggccctgcctgcccctgaggaaaagaccatcagcaaggccaagggccagcctcgcgaacctcaagtctgtacactgcctcctagccgcgacgaactgaccaagaaccaggtgtccctgagctgcgccgtgaagggcttttacccttccgatatcgccgtggaatgggagagcaatggccagcctgagaacaactacaagacaacccctcctgtgctggacagcgacggctcattcttcctggtgtccaagctgacagtggacaagagcagatggcagcagggcaacgtgttcagctgcagcgtgctgcatgaagccctgcacagccactacacccagaagtccctgtctctgagccccggcaagtgataaggatccgatctggtactgcatgcacgcaatgctagctgcccctttcccgtcctgggtaccccgagtctcccccgacctcgggtcccaggtatgctcccacctccacctgccccactcaccacctctgctagttccagacacctcccaagcacgcagcaatgcagctcaaaacgcttagcctagccacacccccacgggaaacagcagtgattaacctttagcaataaacgaaagtttaactaagctatactaaccccagggttggtcaatttcgtgccagccacaccctcgagctagcaaaaaaaaaaaaaaaaaaaaaaaaaaaaaagcatatgactaaaaaaaaaaaaaaaaaaaaaaaaaaaaaaaaaaaaaaaaaaaaaaaaaaaaaaaaaaaaaaaaaaaaaa

SEQ ID NO: 990 - RNA, 1937 nt, synthetic construct
  source 1..1937: mol_type = other RNA
agaataaactagtattcttctggtccccacagactcagagagaacccgccaccatggattggatctggcgcatcctgtttctcgtgggagctgccacaggcgcccactctcaagttcacctgacacagtctggccccgaagtgcggaagcctggcacaagcgtgaaggtgtcctgtaaagcccctggcaacaccctgaaaacctacgacctgcactgggtccgatctgtgcctggacaaggactgcagtggatgggctggattagccacgagggcgacaagaaagtgatcgtggaacggttcaaggccaaagtgaccatcgactgggacagaagcaccaacaccgcctacctgcagctgagcggactgacatctggcgataccgccgtgtactactgtgccaagggcagcaagcaccggctgagagattacgccctgtacgacgatgacggcgccctgaattgggccgtcgatgtggactacctgagcaacctggaattctggggccagggaacagccgtgacagtgtctagtgcttccacaaagggccctagcgtgttccctctggctcctagcagcaagtctacaagcggaggaacagctgccctgggctgcctggtggaagattactttcctgagcctgtgaccgtgtcctggaacagcggtgctctgacttctggcgtgcacacctttccagccgtgctgcaaagcagcggcctgtactctctgagcagcgtggtcacagtgccaagctctagcctgggcacccagacctacatctgcaatgtgaaccacaagcctagcaacaccaaggtggacgacaaggtggaacccaagagctgcgacaagacccacacctgtcctccatgtcctgctccagaactgctggccggaccttccgtgttcctgtttcctccaaagcctaaggacaccctgatgatcagcagaacccctgaagtgacctgcgtggtggtggatgtgtctcacgaggaccctgaagtgaagttcaattggtacgtggacggcgtggaagtgcacaacgccaagaccaagcctagagaggaacagtacaacagcacctacagagtggtgtccgtgctgaccgtgctgcaccaggattggctgaacggcaaagagtacaagtgcaaggtgtccaacaaggccctgcctgcccctatcgaaaagaccatcagcaaggccaagggccagcctcgcgaacctcaagtctgtacactgcctcctagccgcgacgaactgaccaagaaccaggtgtccctgagctgcgccgtgaagggcttttacccttccgatatcgccgtggaatgggagagcaatggccagcctgagaacaactacaagacaacccctcctgtgctggacagcgacggctcattcttcctggtgtccaagctgacagtggacaagagcagatggcagcagggcaacgtgttcagctgcagcgtgctgcatgaagccctgcacagccactacacccagaagtccctgtctctgagccccggcaagtgataaggatccgatctggtactgcatgcacgcaatgctagctgcccctttcccgtcctgggtaccccgagtctcccccgacctcgggtcccaggtatgctcccacctccacctgccccactcaccacctctgctagttccagacacctcccaagcacgcagcaatgcagctcaaaacgcttagcctagccacacccccacgggaaacagcagtgattaacctttagcaataaacgaaagtttaactaagctatactaaccccagggttggtcaatttcgtgccagccacaccctcgagctagcaaaaaaaaaaaaaaaaaaaaaaaaaaaaaagcatatgactaaaaaaaaaaaaaaaaaaaaaaaaaaaaaaaaaaaaaaaaaaaaaaaaaaaaaaaaaaaaaaaaaaaaaa

SEQ ID NO: 991 - RNA, 1937 nt, synthetic construct
  source 1..1937: mol_type = other RNA
agaataaactagtattcttctggtccccacagactcagagagaacccgccaccatggattggatctggcgcatcctgtttctcgtgggagctgccacaggcgcccactctcaagttcacctgacacagtctggccccgaagtgcggaagcctggcacaagcgtgaaggtgtcctgtaaagcccctggcaacaccctgaaaacctacgacctgcactgggtccgatctgtgcctggacaaggactgcagtggatgggctggattagccacgagggcgacaagaaagtgatcgtggaacggttcaaggccaaagtgaccatcgactgggacagaagcaccaacaccgcctacctgcagctgagcggactgacatctggcgataccgccgtgtactactgtgccaagggcagcaagcaccggctgagagattacgccctgtacgacgatgacggcgccctgaattgggccgtcgatgtggactacctgagcaacctggaattctggggccagggaacagccgtgacagtgtctagtgcttccacaaagggccctagcgtgttccctctggctcctagcagcaagtctacaagcggaggaacagctgccctgggctgcctggtggaagattactttcctgagcctgtgaccgtgtcctggaacagcggtgctctgacttctggcgtgcacacctttccagccgtgctgcaaagcagcggcctgtactctctgagcagcgtggtcacagtgccaagctctagcctgggcacccagacctacatctgcaatgtgaaccacaagcctagcaacaccaaggtggacgacaaggtggaacccaagagctgcgacaagacccacacctgtcctccatgtcctgctccagaactgctgggcggaccttccgtgttcctgtttcctccaaagcctaaggacaccctgatgatcagcagaacccctgaagtgacctgcgtggtggtggatgtgtctcacgaggaccctgaagtgaagttcaattggtacgtggacggcgtggaagtgcacaacgccaagaccaagcctagagaggaacagtacaacagcacctacagagtggtgtccgtgctgaccgtgctgcaccaggattggctgaacggcaaagagtacaagtgcaaggtgtccaacaaggccctgcctgcccctgaggaaaagaccatcagcaaggccaagggccagcctcgcgaacctcaagtctgtacactgcctcctagccgcgacgaactgaccaagaaccaggtgtccctgagctgcgccgtgaagggcttttacccttccgatatcgccgtggaatgggagagcaatggccagcctgagaacaactacaagacaacccctcctgtgctggacagcgacggctcattcttcctggtgtccaagctgacagtggacaagagcagatggcagcagggcaacgtgttcagctgcagcgtgctgcatgaagccctgcacagccactacacccagaagtccctgtctctgagccccggcaagtgataaggatccgatctggtactgcatgcacgcaatgctagctgcccctttcccgtcctgggtaccccgagtctcccccgacctcgggtcccaggtatgctcccacctccacctgccccactcaccacctctgctagttccagacacctcccaagcacgcagcaatgcagctcaaaacgcttagcctagccacacccccacgggaaacagcagtgattaacctttagcaataaacgaaagtttaactaagctatactaaccccagggttggtcaatttcgtgccagccacaccctcgagctagcaaaaaaaaaaaaaaaaaaaaaaaaaaaaaagcatatgactaaaaaaaaaaaaaaaaaaaaaaaaaaaaaaaaaaaaaaaaaaaaaaaaaaaaaaaaaaaaaaaaaaaaaa

SEQ ID NO: 992 - RNA, 1937 nt, synthetic construct
  source 1..1937: mol_type = other RNA
agaataaactagtattcttctggtccccacagactcagagagaacccgccaccatggattggatctggcgcatcctgtttctcgtgggagctgccacaggcgcccactctcaagttcacctgacacagtctggccccgaagtgcggaagcctggcacaagcgtgaaggtgtcctgtaaagcccctggcaacaccctgaaaacctacgacctgcactgggtccgatctgtgcctggacaaggactgcagtggatgggctggattagccacgagggcgacaagaaagtgatcgtggaacggttcaaggccaaagtgaccatcgactgggacagaagcaccaacaccgcctacctgcagctgagcggactgacatctggcgataccgccgtgtactactgtgccaagggcagcaagcaccggctgagagattacgccctgtacgacgatgacggcgccctgaattgggccgtcgatgtggactacctgagcaacctggaattctggggccagggaacagccgtgacagtgtctagtgcttccacaaagggccctagcgtgttccctctggctcctagcagcaagtctacaagcggaggaacagctgccctgggctgcctggtggaagattactttcctgagcctgtgaccgtgtcctggaacagcggtgctctgacttctggcgtgcacacctttccagccgtgctgcaaagcagcggcctgtactctctgagcagcgtggtcacagtgccaagctctagcctgggcacccagacctacatctgcaatgtgaaccacaagcctagcaacaccaaggtggacgacaaggtggaacccaagagctgcgacaagacccacacctgtcctccatgtcctgctccagaactgctcggcggaccttccgtgttcctgtttcctccaaagcctaaggacaccctgatgatcagcagaacccctgaagtgacctgcgtggtggtggatgtgtctcacgaggaccccgaagtgaagttcaattggtacgtggacggcgtggaagtgcacaacgccaagaccaagcctagagaggaacagtacaacagcacctacagagtggtgtccgtgctgacagtgctgcaccaggattggctgaacggcaaagagtacaagtgcaaggtgtccaacaaggccctgcctgctcctatcgagaaaaccatcagcaaggccaagggccagcctagggaaccccaggtttacaccctgcctccatgccgcgacgaactgaccaagaaccaggtgtccctgtggtgcctggtcaagggcttctacccttccgatatcgccgtggaatgggagagcaatggccagcctgagaacaactacaagacaacccctcctgtgctggacagcgacggctcattcttcctgtacagcaagctgacagtggacaagagcagatggcagcagggcaacgtgttcagctgcagcgtgctgcatgaagccctgcacagccactacacccagaagtccctgtctctgagccccggcaagtgataaggatccgatctggtactgcatgcacgcaatgctagctgcccctttcccgtcctgggtaccccgagtctcccccgacctcgggtcccaggtatgctcccacctccacctgccccactcaccacctctgctagttccagacacctcccaagcacgcagcaatgcagctcaaaacgcttagcctagccacacccccacgggaaacagcagtgattaacctttagcaataaacgaaagtttaactaagctatactaaccccagggttggtcaatttcgtgccagccacaccctcgagctagcaaaaaaaaaaaaaaaaaaaaaaaaaaaaaagcatatgactaaaaaaaaaaaaaaaaaaaaaaaaaaaaaaaaaaaaaaaaaaaaaaaaaaaaaaaaaaaaaaaaaaaaaa

SEQ ID NO: 993 - RNA, 1937 nt, synthetic construct
  source 1..1937: mol_type = other RNA
agaataaactagtattcttctggtccccacagactcagagagaacccgccaccatggattggatctggcgcatcctgtttctcgtgggagctgccacaggcgcccactctcaagttcacctgacacagtctggccccgaagtgcggaagcctggcacaagcgtgaaggtgtcctgtaaagcccctggcaacaccctgaaaacctacgacctgcactgggtccgatctgtgcctggacaaggactgcagtggatgggctggattagccacgagggcgacaagaaagtgatcgtggaacggttcaaggccaaagtgaccatcgactgggacagaagcaccaacaccgcctacctgcagctgagcggactgacatctggcgataccgccgtgtactactgtgccaagggcagcaagcaccggctgagagattacgccctgtacgacgatgacggcgccctgaattgggccgtcgatgtggactacctgagcaacctggaattctggggccagggaacagccgtgacagtgtctagtgcttccacaaagggccctagcgtgttccctctggctcctagcagcaagtctacaagcggaggaacagctgccctgggctgcctggtggaagattactttcctgagcctgtgaccgtgtcctggaacagcggtgctctgacttctggcgtgcacacctttccagccgtgctgcaaagcagcggcctgtactctctgagcagcgtggtcacagtgccaagctctagcctgggcacccagacctacatctgcaatgtgaaccacaagcctagcaacaccaaggtggacgacaaggtggaacccaagagctgcgacaagacccacacctgtcctccatgtcctgctccagaactgctggccggaccttccgtgttcctgtttcctccaaagcctaaggacaccctgatgatcagcagaacccctgaagtgacctgcgtggtggtggatgtgtctcacgaggaccccgaagtgaagttcaattggtacgtggacggcgtggaagtgcacaatgccaagaccaagcctagagaggaacagtacaacagcacctacagagtggtgtccgtgctgaccgtgctgcaccaggattggctgaacggcaaagagtacaagtgcaaggtgtccaacaaggccctgcctctgcctgaggaaaagaccatcagcaaggccaagggccagcctagggaaccccaggtttacaccctgcctccatgccgcgacgaactgaccaagaaccaggtgtccctgtggtgcctggtcaagggcttctacccttccgatatcgccgtggaatgggagagcaatggccagcctgagaacaactacaagacaacccctcctgtgctggacagcgacggctcattcttcctgtacagcaagctgacagtggacaagagcagatggcagcagggcaacgtgttcagctgcagcgtgctgcatgaagccctgcacagccactacacccagaagtccctgtctctgagccccggcaagtgataaggatccgatctggtactgcatgcacgcaatgctagctgcccctttcccgtcctgggtaccccgagtctcccccgacctcgggtcccaggtatgctcccacctccacctgccccactcaccacctctgctagttccagacacctcccaagcacgcagcaatgcagctcaaaacgcttagcctagccacacccccacgggaaacagcagtgattaacctttagcaataaacgaaagtttaactaagctatactaaccccagggttggtcaatttcgtgccagccacaccctcgagctagcaaaaaaaaaaaaaaaaaaaaaaaaaaaaaagcatatgactaaaaaaaaaaaaaaaaaaaaaaaaaaaaaaaaaaaaaaaaaaaaaaaaaaaaaaaaaaaaaaaaaaaaaa

SEQ ID NO: 994 - RNA, 1937 nt, synthetic construct
  source 1..1937: mol_type = other RNA
agaataaactagtattcttctggtccccacagactcagagagaacccgccaccatggattggatctggcgcatcctgtttctcgtgggagctgccacaggcgcccactctcaagttcacctgacacagtctggccccgaagtgcggaagcctggcacaagcgtgaaggtgtcctgtaaagcccctggcaacaccctgaaaacctacgacctgcactgggtccgatctgtgcctggacaaggactgcagtggatgggctggattagccacgagggcgacaagaaagtgatcgtggaacggttcaaggccaaagtgaccatcgactgggacagaagcaccaacaccgcctacctgcagctgagcggactgacatctggcgataccgccgtgtactactgtgccaagggcagcaagcaccggctgagagattacgccctgtacgacgatgacggcgccctgaattgggccgtcgatgtggactacctgagcaacctggaattctggggccagggaacagccgtgacagtgtctagtgcttccacaaagggccctagcgtgttccctctggctcctagcagcaagtctacaagcggaggaacagctgccctgggctgcctggtggaagattactttcctgagcctgtgaccgtgtcctggaacagcggtgctctgacttctggcgtgcacacctttccagccgtgctgcaaagcagcggcctgtactctctgagcagcgtggtcacagtgccaagctctagcctgggcacccagacctacatctgcaatgtgaaccacaagcctagcaacaccaaggtggacgacaaggtggaacccaagagctgcgacaagacccacacctgtcctccatgtcctgctccagaactgctggccggaccttccgtgttcctgtttcctccaaagcctaaggacaccctgatgatcagcagaacccctgaagtgacctgcgtggtggtggatgtgtctcacgaggaccctgaagtgaagttcaattggtacgtggacggcgtggaagtgcacaacgccaagaccaagcctagagaggaacagtacaacagcacctacagagtggtgtccgtgctgaccgtgctgcaccaggattggctgaacggcaaagagtacaagtgcaaggtgtccaacaaggccctgcctgcccctgaggaaaagaccatcagcaaggccaagggccagcctagggaaccccaggtttacaccctgcctccatgccgcgacgaactgaccaagaaccaggtgtccctgtggtgcctggtcaagggcttctacccttccgatatcgccgtggaatgggagagcaatggccagcctgagaacaactacaagacaacccctcctgtgctggacagcgacggctcattcttcctgtacagcaagctgacagtggacaagagcagatggcagcagggcaacgtgttcagctgcagcgtgctgcatgaagccctgcacagccactacacccagaagtccctgtctctgagccccggcaagtgataaggatccgatctggtactgcatgcacgcaatgctagctgcccctttcccgtcctgggtaccccgagtctcccccgacctcgggtcccaggtatgctcccacctccacctgccccactcaccacctctgctagttccagacacctcccaagcacgcagcaatgcagctcaaaacgcttagcctagccacacccccacgggaaacagcagtgattaacctttagcaataaacgaaagtttaactaagctatactaaccccagggttggtcaatttcgtgccagccacaccctcgagctagcaaaaaaaaaaaaaaaaaaaaaaaaaaaaaagcatatgactaaaaaaaaaaaaaaaaaaaaaaaaaaaaaaaaaaaaaaaaaaaaaaaaaaaaaaaaaaaaaaaaaaaaaa

SEQ ID NO: 995 - RNA, 1937 nt, synthetic construct
  source 1..1937: mol_type = other RNA
agaataaactagtattcttctggtccccacagactcagagagaacccgccaccatggattggatctggcgcatcctgtttctcgtgggagctgccacaggcgcccactctcaagttcacctgacacagtctggccccgaagtgcggaagcctggcacaagcgtgaaggtgtcctgtaaagcccctggcaacaccctgaaaacctacgacctgcactgggtccgatctgtgcctggacaaggactgcagtggatgggctggattagccacgagggcgacaagaaagtgatcgtggaacggttcaaggccaaagtgaccatcgactgggacagaagcaccaacaccgcctacctgcagctgagcggactgacatctggcgataccgccgtgtactactgtgccaagggcagcaagcaccggctgagagattacgccctgtacgacgatgacggcgccctgaattgggccgtcgatgtggactacctgagcaacctggaattctggggccagggaacagccgtgacagtgtctagtgcttccacaaagggccctagcgtgttccctctggctcctagcagcaagtctacaagcggaggaacagctgccctgggctgcctggtggaagattactttcctgagcctgtgaccgtgtcctggaacagcggtgctctgacttctggcgtgcacacctttccagccgtgctgcaaagcagcggcctgtactctctgagcagcgtggtcacagtgccaagctctagcctgggcacccagacctacatctgcaatgtgaaccacaagcctagcaacaccaaggtggacgacaaggtggaacccaagagctgcgacaagacccacacctgtcctccatgtcctgctccagaactgctggccggaccttccgtgttcctgtttcctccaaagcctaaggacaccctgatgatcagcagaacccctgaagtgacctgcgtggtggtggatgtgtctcacgaggaccctgaagtgaagttcaattggtacgtggacggcgtggaagtgcacaacgccaagaccaagcctagagaggaacagtacaacagcacctacagagtggtgtccgtgctgaccgtgctgcaccaggattggctgaacggcaaagagtacaagtgcaaggtgtccaacaaggccctgcctgcccctatcgaaaagaccatcagcaaggccaagggccagcctagggaaccccaggtttacaccctgcctccatgccgcgacgaactgaccaagaaccaggtgtccctgtggtgcctggtcaagggcttctacccttccgatatcgccgtggaatgggagagcaatggccagcctgagaacaactacaagacaacccctcctgtgctggacagcgacggctcattcttcctgtacagcaagctgacagtggacaagagcagatggcagcagggcaacgtgttcagctgcagcgtgctgcatgaagccctgcacagccactacacccagaagtccctgtctctgagccccggcaagtgataaggatccgatctggtactgcatgcacgcaatgctagctgcccctttcccgtcctgggtaccccgagtctcccccgacctcgggtcccaggtatgctcccacctccacctgccccactcaccacctctgctagttccagacacctcccaagcacgcagcaatgcagctcaaaacgcttagcctagccacacccccacgggaaacagcagtgattaacctttagcaataaacgaaagtttaactaagctatactaaccccagggttggtcaatttcgtgccagccacaccctcgagctagcaaaaaaaaaaaaaaaaaaaaaaaaaaaaaagcatatgactaaaaaaaaaaaaaaaaaaaaaaaaaaaaaaaaaaaaaaaaaaaaaaaaaaaaaaaaaaaaaaaaaaaaaa

SEQ ID NO: 996 - RNA, 1937 nt, synthetic construct
  source 1..1937: mol_type = other RNA
agaataaactagtattcttctggtccccacagactcagagagaacccgccaccatggattggatctggcgcatcctgtttctcgtgggagctgccacaggcgcccactctcaagttcacctgacacagtctggccccgaagtgcggaagcctggcacaagcgtgaaggtgtcctgtaaagcccctggcaacaccctgaaaacctacgacctgcactgggtccgatctgtgcctggacaaggactgcagtggatgggctggattagccacgagggcgacaagaaagtgatcgtggaacggttcaaggccaaagtgaccatcgactgggacagaagcaccaacaccgcctacctgcagctgagcggactgacatctggcgataccgccgtgtactactgtgccaagggcagcaagcaccggctgagagattacgccctgtacgacgatgacggcgccctgaattgggccgtcgatgtggactacctgagcaacctggaattctggggccagggaacagccgtgacagtgtctagtgcttccacaaagggccctagcgtgttccctctggctcctagcagcaagtctacaagcggaggaacagctgccctgggctgcctggtggaagattactttcctgagcctgtgaccgtgtcctggaacagcggtgctctgacttctggcgtgcacacctttccagccgtgctgcaaagcagcggcctgtactctctgagcagcgtggtcacagtgccaagctctagcctgggcacccagacctacatctgcaatgtgaaccacaagcctagcaacaccaaggtggacgacaaggtggaacccaagagctgcgacaagacccacacctgtcctccatgtcctgctccagaactgctgggcggaccttccgtgttcctgtttcctccaaagcctaaggacaccctgatgatcagcagaacccctgaagtgacctgcgtggtggtggatgtgtctcacgaggaccctgaagtgaagttcaattggtacgtggacggcgtggaagtgcacaacgccaagaccaagcctagagaggaacagtacaacagcacctacagagtggtgtccgtgctgaccgtgctgcaccaggattggctgaacggcaaagagtacaagtgcaaggtgtccaacaaggccctgcctgcccctgaggaaaagaccatcagcaaggccaagggccagcctagggaaccccaggtttacaccctgcctccatgccgcgacgaactgaccaagaaccaggtgtccctgtggtgcctggtcaagggcttctacccttccgatatcgccgtggaatgggagagcaatggccagcctgagaacaactacaagacaacccctcctgtgctggacagcgacggctcattcttcctgtacagcaagctgacagtggacaagagcagatggcagcagggcaacgtgttcagctgcagcgtgctgcatgaagccctgcacagccactacacccagaagtccctgtctctgagccccggcaagtgataaggatccgatctggtactgcatgcacgcaatgctagctgcccctttcccgtcctgggtaccccgagtctcccccgacctcgggtcccaggtatgctcccacctccacctgccccactcaccacctctgctagttccagacacctcccaagcacgcagcaatgcagctcaaaacgcttagcctagccacacccccacgggaaacagcagtgattaacctttagcaataaacgaaagtttaactaagctatactaaccccagggttggtcaatttcgtgccagccacaccctcgagctagcaaaaaaaaaaaaaaaaaaaaaaaaaaaaaagcatatgactaaaaaaaaaaaaaaaaaaaaaaaaaaaaaaaaaaaaaaaaaaaaaaaaaaaaaaaaaaaaaaaaaaaaaa

SEQ ID NO: 997 - RNA, 1181 nt, synthetic construct
  source 1..1181: mol_type = other RNA
agaataaactagtattcttctggtccccacagactcagagagaacccgccaccatggattggatttggagaatcctgttcctcgtgggcgccgctaccggagcccactccgattttgtcctgactcagtctccacactctctgtccgtcacccctggagagtcggcctccatctcctgcaagtctagtcacagcctcattcatggtgataggaacaattatttggcttggtacgtacagaagccagggcggtctccacaactcctgatctatttggcttccagtcgggcctccggggtccctgacaggttcagtggcagtggatcggacaaagattttacactgaagatcagcagagtggagactgaggatgttgggacgtattactgcatgcaaggtcgagaaagtccctggacgttcggccaagggaccaaggtggacatcaaacgtacggtggccgctcctagcgtgttcatctttccacctagcgacaagagactgaagtctggcacagcctctgtcgtgtgcctgctcaacaacttctaccccagagaagccaaggtgcagtggaaggtggacaacgccctgcagagcggcaatagccaagagagcgtgaccgagcaggacagcaaggactctacctacagcctgagcagcacactgaccctgagcaaggccgactacgagaagcacaaagtgtacgcctgcgaagtgacccaccagggcctttctagccctgtgaccaagagcttcaaccggggcgagtgctgataaggatccgatctggtactgcatgcacgcaatgctagctgcccctttcccgtcctgggtaccccgagtctcccccgacctcgggtcccaggtatgctcccacctccacctgccccactcaccacctctgctagttccagacacctcccaagcacgcagcaatgcagctcaaaacgcttagcctagccacacccccacgggaaacagcagtgattaacctttagcaataaacgaaagtttaactaagctatactaaccccagggttggtcaatttcgtgccagccacaccctcgagctagcaaaaaaaaaaaaaaaaaaaaaaaaaaaaaagcatatgactaaaaaaaaaaaaaaaaaaaaaaaaaaaaaaaaaaaaaaaaaaaaaaaaaaaaaaaaaaaaaaaaaaaaaa

SEQ ID NO: 998 - RNA, 1181 nt, synthetic construct
  source 1..1181: mol_type = other RNA
agaataaactagtattcttctggtccccacagactcagagagaacccgccaccatggattggatttggagaatcctgttcctcgtgggcgccgctaccggagcccactccgattttgtcctgactcagtctccacactctctgtccgtcacccctggagagtcggcctccatctcctgcaagtctagtcacagcctcattcatggtgataggaacaattatttggcttggtacgtacagaagccagggcggtctccacaactcctgatctatttggcttccagtcgggcctccggggtccctgacaggttcagtggcagtggatcggacaaagattttacactgaagatcagcagagtggagactgaggatgttgggacgtattactgcatgcaaggtcgagaaagtccctggacgttcggccaagggaccaaggtggacatcaaacgtacggtggccgctcctagcgtgttcatctttccacctagcgacagaaagctgaagtctggcacagcctctgtcgtgtgcctgctcaacaacttctaccccagagaagccaaggtgcagtggaaggtggacaacgccctgcagagcggcaatagccaagagagcgtgaccgagcaggacagcaaggactctacctacagcctgagcagcacactgaccctgagcaaggccgactacgagaagcacaaagtgtacgcctgcgaagtgacccaccagggcctttctagccctgtgaccaagagcttcaaccggggcgagtgctgataaggatccgatctggtactgcatgcacgcaatgctagctgcccctttcccgtcctgggtaccccgagtctcccccgacctcgggtcccaggtatgctcccacctccacctgccccactcaccacctctgctagttccagacacctcccaagcacgcagcaatgcagctcaaaacgcttagcctagccacacccccacgggaaacagcagtgattaacctttagcaataaacgaaagtttaactaagctatactaaccccagggttggtcaatttcgtgccagccacaccctcgagctagcaaaaaaaaaaaaaaaaaaaaaaaaaaaaaagcatatgactaaaaaaaaaaaaaaaaaaaaaaaaaaaaaaaaaaaaaaaaaaaaaaaaaaaaaaaaaaaaaaaaaaaaaa

SEQ ID NO: 999 - RNA, 2099 nt, synthetic construct
  source 1..2099: mol_type = other RNA
agaataaactagtattcttctggtccccacagactcagagagaacccgccaccatggattggatctggcgcatcctgtttctcgtgggagctgccacaggcgcccactctcaagttcacctgacacagtctggccccgaagtgcggaagcctggcacaagcgtgaaggtgtcctgtaaagcccctggcaacaccctgaaaacctacgacctgcactgggtccgatctgtgcctggacaaggactgcagtggatgggctggattagccacgagggcgacaagaaagtgatcgtggaacggttcaaggccaaagtgaccatcgactgggacagaagcaccaacaccgcctacctgcagctgagcggactgacatctggcgataccgccgtgtactactgtgccaagggcagcaagcaccggctgagagattacgccctgtacgacgatgacggcgccctgaattgggccgtcgatgtggactacctgagcaacctggaattctggggccagggaacagccgtgacagtgtcttccggtggcggaggaagcggaggcggaggttcaggcggcggaggctctggcggtggtggatctgattttgtgctgacacagagccctcacagcctgagcgttacacctggcgagagcgccagcatcagctgcaagtctagccactctctgatccacggcgaccggaacaactacctggcttggtacgtgcagaagcccggcagatctcctcagctgctgatctacctggccagcagcagagctagcggcgtgccagatagattttctggcagcggcagcgacaaggatttcaccctgaagatctccagagtggaaaccgaggacgtgggcacctactactgtatgcagggcagagagagcccctggacatttggccagggcaccaaggtggacatcaaaggtggcggtggttctggcggaggcggaagtggcggcggtgggtccggaggtggtggatctgaacctaagagcagcgacaagacccacacctgtcctccatgtcctgctccagaactgctcggcggaccttccgtgttcctgtttcctccaaagcctaaggacaccctgatgatcagcagaacccctgaagtgacctgcgtggtggtggatgtgtctcacgaggaccccgaagtgaagttcaattggtacgtggacggcgtggaagtgcacaacgccaagaccaagcctagagaggaacagtacaacagcacctacagagtggtgtccgtgctgacagtgctgcaccaggattggctgaacggcaaagagtacaagtgcaaggtgtccaacaaggccctgcctgctcctatcgagaaaaccatcagcaaggccaagggccagcctagggaaccccaggtttacacactgcctccaagccgcgaggaaatgaccaagaaccaggtgtccctgacctgcctcgtgaagggcttctacccttccgatatcgccgtggaatgggagagcaatggccagcctgagaacaactacaagacaacccctcctgtgctggacagcgacggctcattcttcctgtacagcaagctgactgtggataagtcccggtggcagcagggcaacgtgttcagctgttctgtgatgcacgaagccctgcacaaccactacacccagaaaagcctgtctctgagccccggcaagtgataaggatccgatctggtactgcatgcacgcaatgctagctgcccctttcccgtcctgggtaccccgagtctcccccgacctcgggtcccaggtatgctcccacctccacctgccccactcaccacctctgctagttccagacacctcccaagcacgcagcaatgcagctcaaaacgcttagcctagccacacccccacgggaaacagcagtgattaacctttagcaataaacgaaagtttaactaagctatactaaccccagggttggtcaatttcgtgccagccacaccctcgagctagcaaaaaaaaaaaaaaaaaaaaaaaaaaaaaagcatatgactaaaaaaaaaaaaaaaaaaaaaaaaaaaaaaaaaaaaaaaaaaaaaaaaaaaaaaaaaaaaaaaaaaaaaa

SEQ ID NO: 1000 - RNA, 2099 nt, synthetic construct
  source 1..2099: mol_type = other RNA
agaataaactagtattcttctggtccccacagactcagagagaacccgccaccatggattggatctggcgcatcctgtttctcgtgggagctgccacaggcgcccactctcaagttcacctgacacagtctggccccgaagtgcggaagcctggcacaagcgtgaaggtgtcctgtaaagcccctggcaacaccctgaaaacctacgacctgcactgggtccgatctgtgcctggacaaggactgcagtggatgggctggattagccacgagggcgacaagaaagtgatcgtggaacggttcaaggccaaagtgaccatcgactgggacagaagcaccaacaccgcctacctgcagctgagcggactgacatctggcgataccgccgtgtactactgtgccaagggcagcaagcaccggctgagagattacgccctgtacgacgatgacggcgccctgaattgggccgtcgatgtggactacctgagcaacctggaattctggggccagggaacagccgtgacagtgtcttccggtggcggaggaagcggaggcggaggttcaggcggcggaggctctggcggtggtggatctgattttgtgctgacacagagccctcacagcctgagcgttacacctggcgagagcgccagcatcagctgcaagtctagccactctctgatccacggcgaccggaacaactacctggcttggtacgtgcagaagcccggcagatctcctcagctgctgatctacctggccagcagcagagctagcggcgtgccagatagattttctggcagcggcagcgacaaggatttcaccctgaagatctccagagtggaaaccgaggacgtgggcacctactactgtatgcagggcagagagagcccctggacatttggccagggcaccaaggtggacatcaaaggtggcggtggttctggcggaggcggaagtggcggcggtgggtccggaggtggtggatctgaacctaagagcagcgacaagacccacacctgtcctccatgtcctgctccagaactgctcggcggaccttccgtgttcctgtttcctccaaagcctaaggacaccctgatgatcagcagaacccctgaagtgacctgcgtggtggtggatgtgtctcacgaggaccccgaagtgaagttcaattggtacgtggacggcgtggaagtgcacaacgccaagaccaagcctagagaggaacagtacaacagcacctacagagtggtgtccgtgctgacagtgctgcaccaggattggctgaacggcaaagagtacaagtgcaaggtgtccaacaaggccctgcctgctcctatcgagaaaaccatcagcaaggccaagggccagcctagggaaccccaggtttacacactgcctccaagccgcgaggaaatgaccaagaaccaggtgtccctgacctgcctcgtgaagggcttctacccttccgatatcgccgtggaatgggagagcaatggccagcctgagaacaactacaagacaacccctcctgtgctggacagcgacggctcattcttcctgtacagcaagctgaccgtggacaagtccagatggcagcagggcaacgtgttcagctgtagcgtgctgcacgaagccctgcacagccactacacccagaaaagcctgtctctgagccccggcaaatgataaggatccgatctggtactgcatgcacgcaatgctagctgcccctttcccgtcctgggtaccccgagtctcccccgacctcgggtcccaggtatgctcccacctccacctgccccactcaccacctctgctagttccagacacctcccaagcacgcagcaatgcagctcaaaacgcttagcctagccacacccccacgggaaacagcagtgattaacctttagcaataaacgaaagtttaactaagctatactaaccccagggttggtcaatttcgtgccagccacaccctcgagctagcaaaaaaaaaaaaaaaaaaaaaaaaaaaaaagcatatgactaaaaaaaaaaaaaaaaaaaaaaaaaaaaaaaaaaaaaaaaaaaaaaaaaaaaaaaaaaaaaaaaaaaaaa

SEQ ID NO: 1001 - RNA, 2099 nt, synthetic construct
  source 1..2099: mol_type = other RNA
agaataaactagtattcttctggtccccacagactcagagagaacccgccaccatggattggatctggcgcatcctgtttctcgtgggagctgccacaggcgcccactctcaagttcacctgacacagtctggccccgaagtgcggaagcctggcacaagcgtgaaggtgtcctgtaaagcccctggcaacaccctgaaaacctacgacctgcactgggtccgatctgtgcctggacaaggactgcagtggatgggctggattagccacgagggcgacaagaaagtgatcgtggaacggttcaaggccaaagtgaccatcgactgggacagaagcaccaacaccgcctacctgcagctgagcggactgacatctggcgataccgccgtgtactactgtgccaagggcagcaagcaccggctgagagattacgccctgtacgacgatgacggcgccctgaattgggccgtcgatgtggactacctgagcaacctggaattctggggccagggaacagccgtgacagtgtcttccggtggcggaggaagcggaggcggaggttcaggcggcggaggctctggcggtggtggatctgattttgtgctgacacagagccctcacagcctgagcgttacacctggcgagagcgccagcatcagctgcaagtctagccactctctgatccacggcgaccggaacaactacctggcttggtacgtgcagaagcccggcagatctcctcagctgctgatctacctggccagcagcagagctagcggcgtgccagatagattttctggcagcggcagcgacaaggatttcaccctgaagatctccagagtggaaaccgaggacgtgggcacctactactgtatgcagggcagagagagcccctggacatttggccagggcaccaaggtggacatcaaaggtggcggtggttctggcggaggcggaagtggcggcggtgggtccggaggtggtggatctgaacctaagagcagcgacaagacccacacctgtcctccatgtcctgctccagaactgctggccggaccttccgtgttcctgtttcctccaaagcctaaggacaccctgatgatcagcagaacccctgaagtgacctgcgtggtggtggatgtgtctcacgaggaccccgaagtgaagttcaattggtacgtggacggcgtggaagtgcacaatgccaagaccaagcctagagaggaacagtacaacagcacctacagagtggtgtccgtgctgaccgtgctgcaccaggattggctgaacggcaaagagtacaagtgcaaggtgtccaacaaggccctgcctctgcctgaggaaaagaccatcagcaaggccaagggccagcctagggaaccccaggtttacacactgcctccaagccgcgaggaaatgaccaagaaccaggtgtccctgacctgcctcgtgaagggcttctacccttccgatatcgccgtggaatgggagagcaatggccagcctgagaacaactacaagacaacccctcctgtgctggacagcgacggctcattcttcctgtacagcaagctgaccgtggacaagtccagatggcagcagggcaacgtgttcagctgtagcgtgctgcacgaagccctgcacagccactacacccagaaaagcctgtctctgagccccggcaaatgataaggatccgatctggtactgcatgcacgcaatgctagctgcccctttcccgtcctgggtaccccgagtctcccccgacctcgggtcccaggtatgctcccacctccacctgccccactcaccacctctgctagttccagacacctcccaagcacgcagcaatgcagctcaaaacgcttagcctagccacacccccacgggaaacagcagtgattaacctttagcaataaacgaaagtttaactaagctatactaaccccagggttggtcaatttcgtgccagccacaccctcgagctagcaaaaaaaaaaaaaaaaaaaaaaaaaaaaaagcatatgactaaaaaaaaaaaaaaaaaaaaaaaaaaaaaaaaaaaaaaaaaaaaaaaaaaaaaaaaaaaaaaaaaaaaaa

SEQ ID NO: 1002 - RNA, 2099 nt, synthetic construct
  source 1..2099: mol_type = other RNA
agaataaactagtattcttctggtccccacagactcagagagaacccgccaccatggattggatctggcgcatcctgtttctcgtgggagctgccacaggcgcccactctcaagttcacctgacacagtctggccccgaagtgcggaagcctggcacaagcgtgaaggtgtcctgtaaagcccctggcaacaccctgaaaacctacgacctgcactgggtccgatctgtgcctggacaaggactgcagtggatgggctggattagccacgagggcgacaagaaagtgatcgtggaacggttcaaggccaaagtgaccatcgactgggacagaagcaccaacaccgcctacctgcagctgagcggactgacatctggcgataccgccgtgtactactgtgccaagggcagcaagcaccggctgagagattacgccctgtacgacgatgacggcgccctgaattgggccgtcgatgtggactacctgagcaacctggaattctggggccagggaacagccgtgacagtgtcttccggtggcggaggaagcggaggcggaggttcaggcggcggaggctctggcggtggtggatctgattttgtgctgacacagagccctcacagcctgagcgttacacctggcgagagcgccagcatcagctgcaagtctagccactctctgatccacggcgaccggaacaactacctggcttggtacgtgcagaagcccggcagatctcctcagctgctgatctacctggccagcagcagagctagcggcgtgccagatagattttctggcagcggcagcgacaaggatttcaccctgaagatctccagagtggaaaccgaggacgtgggcacctactactgtatgcagggcagagagagcccctggacatttggccagggcaccaaggtggacatcaaaggtggcggtggttctggcggaggcggaagtggcggcggtgggtccggaggtggtggatctgaacctaagagcagcgacaagacccacacctgtcctccatgtcctgctccagaactgctggccggaccttccgtgttcctgtttcctccaaagcctaaggacaccctgatgatcagcagaacccctgaagtgacctgcgtggtggtggatgtgtctcacgaggaccctgaagtgaagttcaattggtacgtggacggcgtggaagtgcacaacgccaagaccaagcctagagaggaacagtacaacagcacctacagagtggtgtccgtgctgaccgtgctgcaccaggattggctgaacggcaaagagtacaagtgcaaggtgtccaacaaggccctgcctgcccctgaggaaaagaccatcagcaaggccaagggccagcctagggaaccccaggtttacacactgcctccaagccgcgaggaaatgaccaagaaccaggtgtccctgacctgcctcgtgaagggcttctacccttccgatatcgccgtggaatgggagagcaatggccagcctgagaacaactacaagacaacccctcctgtgctggacagcgacggctcattcttcctgtacagcaagctgaccgtggacaagtccagatggcagcagggcaacgtgttcagctgtagcgtgctgcacgaagccctgcacagccactacacccagaaaagcctgtctctgagccccggcaaatgataaggatccgatctggtactgcatgcacgcaatgctagctgcccctttcccgtcctgggtaccccgagtctcccccgacctcgggtcccaggtatgctcccacctccacctgccccactcaccacctctgctagttccagacacctcccaagcacgcagcaatgcagctcaaaacgcttagcctagccacacccccacgggaaacagcagtgattaacctttagcaataaacgaaagtttaactaagctatactaaccccagggttggtcaatttcgtgccagccacaccctcgagctagcaaaaaaaaaaaaaaaaaaaaaaaaaaaaaagcatatgactaaaaaaaaaaaaaaaaaaaaaaaaaaaaaaaaaaaaaaaaaaaaaaaaaaaaaaaaaaaaaaaaaaaaaa

SEQ ID NO: 1003 - RNA, 2099 nt, synthetic construct
  source 1..2099: mol_type = other RNA
agaataaactagtattcttctggtccccacagactcagagagaacccgccaccatggattggatctggcgcatcctgtttctcgtgggagctgccacaggcgcccactctcaagttcacctgacacagtctggccccgaagtgcggaagcctggcacaagcgtgaaggtgtcctgtaaagcccctggcaacaccctgaaaacctacgacctgcactgggtccgatctgtgcctggacaaggactgcagtggatgggctggattagccacgagggcgacaagaaagtgatcgtggaacggttcaaggccaaagtgaccatcgactgggacagaagcaccaacaccgcctacctgcagctgagcggactgacatctggcgataccgccgtgtactactgtgccaagggcagcaagcaccggctgagagattacgccctgtacgacgatgacggcgccctgaattgggccgtcgatgtggactacctgagcaacctggaattctggggccagggaacagccgtgacagtgtcttccggtggcggaggaagcggaggcggaggttcaggcggcggaggctctggcggtggtggatctgattttgtgctgacacagagccctcacagcctgagcgttacacctggcgagagcgccagcatcagctgcaagtctagccactctctgatccacggcgaccggaacaactacctggcttggtacgtgcagaagcccggcagatctcctcagctgctgatctacctggccagcagcagagctagcggcgtgccagatagattttctggcagcggcagcgacaaggatttcaccctgaagatctccagagtggaaaccgaggacgtgggcacctactactgtatgcagggcagagagagcccctggacatttggccagggcaccaaggtggacatcaaaggtggcggtggttctggcggaggcggaagtggcggcggtgggtccggaggtggtggatctgaacctaagagcagcgacaagacccacacctgtcctccatgtcctgctccagaactgctggccggaccttccgtgttcctgtttcctccaaagcctaaggacaccctgatgatcagcagaacccctgaagtgacctgcgtggtggtggatgtgtctcacgaggaccctgaagtgaagttcaattggtacgtggacggcgtggaagtgcacaacgccaagaccaagcctagagaggaacagtacaacagcacctacagagtggtgtccgtgctgaccgtgctgcaccaggattggctgaacggcaaagagtacaagtgcaaggtgtccaacaaggccctgcctgcccctatcgaaaagaccatcagcaaggccaagggccagcctagggaaccccaggtttacacactgcctccaagccgcgaggaaatgaccaagaaccaggtgtccctgacctgcctcgtgaagggcttctacccttccgatatcgccgtggaatgggagagcaatggccagcctgagaacaactacaagacaacccctcctgtgctggacagcgacggctcattcttcctgtacagcaagctgaccgtggacaagtccagatggcagcagggcaacgtgttcagctgtagcgtgctgcacgaagccctgcacagccactacacccagaaaagcctgtctctgagccccggcaaatgataaggatccgatctggtactgcatgcacgcaatgctagctgcccctttcccgtcctgggtaccccgagtctcccccgacctcgggtcccaggtatgctcccacctccacctgccccactcaccacctctgctagttccagacacctcccaagcacgcagcaatgcagctcaaaacgcttagcctagccacacccccacgggaaacagcagtgattaacctttagcaataaacgaaagtttaactaagctatactaaccccagggttggtcaatttcgtgccagccacaccctcgagctagcaaaaaaaaaaaaaaaaaaaaaaaaaaaaaagcatatgactaaaaaaaaaaaaaaaaaaaaaaaaaaaaaaaaaaaaaaaaaaaaaaaaaaaaaaaaaaaaaaaaaaaaaa

SEQ ID NO: 1004 - RNA, 2099 nt, synthetic construct
  source 1..2099: mol_type = other RNA
agaataaactagtattcttctggtccccacagactcagagagaacccgccaccatggattggatctggcgcatcctgtttctcgtgggagctgccacaggcgcccactctcaagttcacctgacacagtctggccccgaagtgcggaagcctggcacaagcgtgaaggtgtcctgtaaagcccctggcaacaccctgaaaacctacgacctgcactgggtccgatctgtgcctggacaaggactgcagtggatgggctggattagccacgagggcgacaagaaagtgatcgtggaacggttcaaggccaaagtgaccatcgactgggacagaagcaccaacaccgcctacctgcagctgagcggactgacatctggcgataccgccgtgtactactgtgccaagggcagcaagcaccggctgagagattacgccctgtacgacgatgacggcgccctgaattgggccgtcgatgtggactacctgagcaacctggaattctggggccagggaacagccgtgacagtgtcttccggtggcggaggaagcggaggcggaggttcaggcggcggaggctctggcggtggtggatctgattttgtgctgacacagagccctcacagcctgagcgttacacctggcgagagcgccagcatcagctgcaagtctagccactctctgatccacggcgaccggaacaactacctggcttggtacgtgcagaagcccggcagatctcctcagctgctgatctacctggccagcagcagagctagcggcgtgccagatagattttctggcagcggcagcgacaaggatttcaccctgaagatctccagagtggaaaccgaggacgtgggcacctactactgtatgcagggcagagagagcccctggacatttggccagggcaccaaggtggacatcaaaggtggcggtggttctggcggaggcggaagtggcggcggtgggtccggaggtggtggatctgaacctaagagcagcgacaagacccacacctgtcctccatgtcctgctccagaactgctgggcggaccttccgtgttcctgtttcctccaaagcctaaggacaccctgatgatcagcagaacccctgaagtgacctgcgtggtggtggatgtgtctcacgaggaccctgaagtgaagttcaattggtacgtggacggcgtggaagtgcacaacgccaagaccaagcctagagaggaacagtacaacagcacctacagagtggtgtccgtgctgaccgtgctgcaccaggattggctgaacggcaaagagtacaagtgcaaggtgtccaacaaggccctgcctgcccctgaggaaaagaccatcagcaaggccaagggccagcctagggaaccccaggtttacacactgcctccaagccgcgaggaaatgaccaagaaccaggtgtccctgacctgcctcgtgaagggcttctacccttccgatatcgccgtggaatgggagagcaatggccagcctgagaacaactacaagacaacccctcctgtgctggacagcgacggctcattcttcctgtacagcaagctgaccgtggacaagtccagatggcagcagggcaacgtgttcagctgtagcgtgctgcacgaagccctgcacagccactacacccagaaaagcctgtctctgagccccggcaaatgataaggatccgatctggtactgcatgcacgcaatgctagctgcccctttcccgtcctgggtaccccgagtctcccccgacctcgggtcccaggtatgctcccacctccacctgccccactcaccacctctgctagttccagacacctcccaagcacgcagcaatgcagctcaaaacgcttagcctagccacacccccacgggaaacagcagtgattaacctttagcaataaacgaaagtttaactaagctatactaaccccagggttggtcaatttcgtgccagccacaccctcgagctagcaaaaaaaaaaaaaaaaaaaaaaaaaaaaaagcatatgactaaaaaaaaaaaaaaaaaaaaaaaaaaaaaaaaaaaaaaaaaaaaaaaaaaaaaaaaaaaaaaaaaaaaaa

SEQ ID NO: 1005 - RNA, 2099 nt, synthetic construct
  source 1..2099: mol_type = other RNA
agaataaactagtattcttctggtccccacagactcagagagaacccgccaccatggattggatctggcgcatcctgtttctcgtgggagctgccacaggcgcccactctcaagttcacctgacacagtctggccccgaagtgcggaagcctggcacaagcgtgaaggtgtcctgtaaagcccctggcaacaccctgaaaacctacgacctgcactgggtccgatctgtgcctggacaaggactgcagtggatgggctggattagccacgagggcgacaagaaagtgatcgtggaacggttcaaggccaaagtgaccatcgactgggacagaagcaccaacaccgcctacctgcagctgagcggactgacatctggcgataccgccgtgtactactgtgccaagggcagcaagcaccggctgagagattacgccctgtacgacgatgacggcgccctgaattgggccgtcgatgtggactacctgagcaacctggaattctggggccagggaacagccgtgacagtgtcttccggtggcggaggaagcggaggcggaggttcaggcggcggaggctctggcggtggtggatctgattttgtgctgacacagagccctcacagcctgagcgttacacctggcgagagcgccagcatcagctgcaagtctagccactctctgatccacggcgaccggaacaactacctggcttggtacgtgcagaagcccggcagatctcctcagctgctgatctacctggccagcagcagagctagcggcgtgccagatagattttctggcagcggcagcgacaaggatttcaccctgaagatctccagagtggaaaccgaggacgtgggcacctactactgtatgcagggcagagagagcccctggacatttggccagggcaccaaggtggacatcaaaggtggcggtggttctggcggaggcggaagtggcggcggtgggtccggaggtggtggatctgaacctaagagcagcgacaagacccacacctgtcctccatgtcctgctccagaactgctcggcggaccttccgtgttcctgtttcctccaaagcctaaggacaccctgatgatcagcagaacccctgaagtgacctgcgtggtggtggatgtgtctcacgaggaccccgaagtgaagttcaattggtacgtggacggcgtggaagtgcacaacgccaagaccaagcctagagaggaacagtacaacagcacctacagagtggtgtccgtgctgacagtgctgcaccaggattggctgaacggcaaagagtacaagtgcaaggtgtccaacaaggccctgcctgctcctatcgagaaaaccatcagcaaggccaagggccagcctagggaaccccaagtctgtacactgcctcctagccgcgaggaaatgaccaagaaccaggtgtccctgagctgcgccgtgaagggcttttacccttccgatatcgccgtggaatgggagagcaatggccagcctgagaacaactacaagacaacccctcctgtgctggacagcgacggctcattcttcctggtgtccaagctgacagtggacaagagcagatggcagcagggcaacgtgttcagctgctctgtgctgcacgaagccctgcacagccactacacccagaagtccctgtctctgagccccggcaagtgataaggatccgatctggtactgcatgcacgcaatgctagctgcccctttcccgtcctgggtaccccgagtctcccccgacctcgggtcccaggtatgctcccacctccacctgccccactcaccacctctgctagttccagacacctcccaagcacgcagcaatgcagctcaaaacgcttagcctagccacacccccacgggaaacagcagtgattaacctttagcaataaacgaaagtttaactaagctatactaaccccagggttggtcaatttcgtgccagccacaccctcgagctagcaaaaaaaaaaaaaaaaaaaaaaaaaaaaaagcatatgactaaaaaaaaaaaaaaaaaaaaaaaaaaaaaaaaaaaaaaaaaaaaaaaaaaaaaaaaaaaaaaaaaaaaaa

SEQ ID NO: 1006 - RNA, 2099 nt, synthetic construct
  source 1..2099: mol_type = other RNA
agaataaactagtattcttctggtccccacagactcagagagaacccgccaccatggattggatctggcgcatcctgtttctcgtgggagctgccacaggcgcccactctcaagttcacctgacacagtctggccccgaagtgcggaagcctggcacaagcgtgaaggtgtcctgtaaagcccctggcaacaccctgaaaacctacgacctgcactgggtccgatctgtgcctggacaaggactgcagtggatgggctggattagccacgagggcgacaagaaagtgatcgtggaacggttcaaggccaaagtgaccatcgactgggacagaagcaccaacaccgcctacctgcagctgagcggactgacatctggcgataccgccgtgtactactgtgccaagggcagcaagcaccggctgagagattacgccctgtacgacgatgacggcgccctgaattgggccgtcgatgtggactacctgagcaacctggaattctggggccagggaacagccgtgacagtgtcttccggtggcggaggaagcggaggcggaggttcaggcggcggaggctctggcggtggtggatctgattttgtgctgacacagagccctcacagcctgagcgttacacctggcgagagcgccagcatcagctgcaagtctagccactctctgatccacggcgaccggaacaactacctggcttggtacgtgcagaagcccggcagatctcctcagctgctgatctacctggccagcagcagagctagcggcgtgccagatagattttctggcagcggcagcgacaaggatttcaccctgaagatctccagagtggaaaccgaggacgtgggcacctactactgtatgcagggcagagagagcccctggacatttggccagggcaccaaggtggacatcaaaggtggcggtggttctggcggaggcggaagtggcggcggtgggtccggaggtggtggatctgaacctaagagcagcgacaagacccacacctgtcctccatgtcctgctccagaactgctggccggaccttccgtgttcctgtttcctccaaagcctaaggacaccctgatgatcagcagaacccctgaagtgacctgcgtggtggtggatgtgtctcacgaggaccccgaagtgaagttcaattggtacgtggacggcgtggaagtgcacaatgccaagaccaagcctagagaggaacagtacaacagcacctacagagtggtgtccgtgctgaccgtgctgcaccaggattggctgaacggcaaagagtacaagtgcaaggtgtccaacaaggccctgcctctgcctgaggaaaagaccatcagcaaggccaagggccagcctagggaaccccaagtctgtacactgcctcctagccgcgaggaaatgaccaagaaccaggtgtccctgagctgcgccgtgaagggcttttacccttccgatatcgccgtggaatgggagagcaatggccagcctgagaacaactacaagacaacccctcctgtgctggacagcgacggctcattcttcctggtgtccaagctgacagtggacaagagcagatggcagcagggcaacgtgttcagctgctctgtgctgcacgaagccctgcacagccactacacccagaagtccctgtctctgagccccggcaagtgataaggatccgatctggtactgcatgcacgcaatgctagctgcccctttcccgtcctgggtaccccgagtctcccccgacctcgggtcccaggtatgctcccacctccacctgccccactcaccacctctgctagttccagacacctcccaagcacgcagcaatgcagctcaaaacgcttagcctagccacacccccacgggaaacagcagtgattaacctttagcaataaacgaaagtttaactaagctatactaaccccagggttggtcaatttcgtgccagccacaccctcgagctagcaaaaaaaaaaaaaaaaaaaaaaaaaaaaaagcatatgactaaaaaaaaaaaaaaaaaaaaaaaaaaaaaaaaaaaaaaaaaaaaaaaaaaaaaaaaaaaaaaaaaaaaaa

SEQ ID NO: 1007 - RNA, 2099 nt, synthetic construct
  source 1..2099: mol_type = other RNA
agaataaactagtattcttctggtccccacagactcagagagaacccgccaccatggattggatctggcgcatcctgtttctcgtgggagctgccacaggcgcccactctcaagttcacctgacacagtctggccccgaagtgcggaagcctggcacaagcgtgaaggtgtcctgtaaagcccctggcaacaccctgaaaacctacgacctgcactgggtccgatctgtgcctggacaaggactgcagtggatgggctggattagccacgagggcgacaagaaagtgatcgtggaacggttcaaggccaaagtgaccatcgactgggacagaagcaccaacaccgcctacctgcagctgagcggactgacatctggcgataccgccgtgtactactgtgccaagggcagcaagcaccggctgagagattacgccctgtacgacgatgacggcgccctgaattgggccgtcgatgtggactacctgagcaacctggaattctggggccagggaacagccgtgacagtgtcttccggtggcggaggaagcggaggcggaggttcaggcggcggaggctctggcggtggtggatctgattttgtgctgacacagagccctcacagcctgagcgttacacctggcgagagcgccagcatcagctgcaagtctagccactctctgatccacggcgaccggaacaactacctggcttggtacgtgcagaagcccggcagatctcctcagctgctgatctacctggccagcagcagagctagcggcgtgccagatagattttctggcagcggcagcgacaaggatttcaccctgaagatctccagagtggaaaccgaggacgtgggcacctactactgtatgcagggcagagagagcccctggacatttggccagggcaccaaggtggacatcaaaggtggcggtggttctggcggaggcggaagtggcggcggtgggtccggaggtggtggatctgaacctaagagcagcgacaagacccacacctgtcctccatgtcctgctccagaactgctggccggaccttccgtgttcctgtttcctccaaagcctaaggacaccctgatgatcagcagaacccctgaagtgacctgcgtggtggtggatgtgtctcacgaggaccctgaagtgaagttcaattggtacgtggacggcgtggaagtgcacaacgccaagaccaagcctagagaggaacagtacaacagcacctacagagtggtgtccgtgctgaccgtgctgcaccaggattggctgaacggcaaagagtacaagtgcaaggtgtccaacaaggccctgcctgcccctgaggaaaagaccatcagcaaggccaagggccagcctagggaaccccaagtctgtacactgcctcctagccgcgaggaaatgaccaagaaccaggtgtccctgagctgcgccgtgaagggcttttacccttccgatatcgccgtggaatgggagagcaatggccagcctgagaacaactacaagacaacccctcctgtgctggacagcgacggctcattcttcctggtgtccaagctgacagtggacaagagcagatggcagcagggcaacgtgttcagctgctctgtgctgcacgaagccctgcacagccactacacccagaagtccctgtctctgagccccggcaagtgataaggatccgatctggtactgcatgcacgcaatgctagctgcccctttcccgtcctgggtaccccgagtctcccccgacctcgggtcccaggtatgctcccacctccacctgccccactcaccacctctgctagttccagacacctcccaagcacgcagcaatgcagctcaaaacgcttagcctagccacacccccacgggaaacagcagtgattaacctttagcaataaacgaaagtttaactaagctatactaaccccagggttggtcaatttcgtgccagccacaccctcgagctagcaaaaaaaaaaaaaaaaaaaaaaaaaaaaaagcatatgactaaaaaaaaaaaaaaaaaaaaaaaaaaaaaaaaaaaaaaaaaaaaaaaaaaaaaaaaaaaaaaaaaaaaaa

SEQ ID NO: 1008 - RNA, 2099 nt, synthetic construct
  source 1..2099: mol_type = other RNA
agaataaactagtattcttctggtccccacagactcagagagaacccgccaccatggattggatctggcgcatcctgtttctcgtgggagctgccacaggcgcccactctcaagttcacctgacacagtctggccccgaagtgcggaagcctggcacaagcgtgaaggtgtcctgtaaagcccctggcaacaccctgaaaacctacgacctgcactgggtccgatctgtgcctggacaaggactgcagtggatgggctggattagccacgagggcgacaagaaagtgatcgtggaacggttcaaggccaaagtgaccatcgactgggacagaagcaccaacaccgcctacctgcagctgagcggactgacatctggcgataccgccgtgtactactgtgccaagggcagcaagcaccggctgagagattacgccctgtacgacgatgacggcgccctgaattgggccgtcgatgtggactacctgagcaacctggaattctggggccagggaacagccgtgacagtgtcttccggtggcggaggaagcggaggcggaggttcaggcggcggaggctctggcggtggtggatctgattttgtgctgacacagagccctcacagcctgagcgttacacctggcgagagcgccagcatcagctgcaagtctagccactctctgatccacggcgaccggaacaactacctggcttggtacgtgcagaagcccggcagatctcctcagctgctgatctacctggccagcagcagagctagcggcgtgccagatagattttctggcagcggcagcgacaaggatttcaccctgaagatctccagagtggaaaccgaggacgtgggcacctactactgtatgcagggcagagagagcccctggacatttggccagggcaccaaggtggacatcaaaggtggcggtggttctggcggaggcggaagtggcggcggtgggtccggaggtggtggatctgaacctaagagcagcgacaagacccacacctgtcctccatgtcctgctccagaactgctggccggaccttccgtgttcctgtttcctccaaagcctaaggacaccctgatgatcagcagaacccctgaagtgacctgcgtggtggtggatgtgtctcacgaggaccctgaagtgaagttcaattggtacgtggacggcgtggaagtgcacaacgccaagaccaagcctagagaggaacagtacaacagcacctacagagtggtgtccgtgctgaccgtgctgcaccaggattggctgaacggcaaagagtacaagtgcaaggtgtccaacaaggccctgcctgcccctatcgaaaagaccatcagcaaggccaagggccagcctagggaaccccaagtctgtacactgcctcctagccgcgaggaaatgaccaagaaccaggtgtccctgagctgcgccgtgaagggcttttacccttccgatatcgccgtggaatgggagagcaatggccagcctgagaacaactacaagacaacccctcctgtgctggacagcgacggctcattcttcctggtgtccaagctgacagtggacaagagcagatggcagcagggcaacgtgttcagctgctctgtgctgcacgaagccctgcacagccactacacccagaagtccctgtctctgagccccggcaagtgataaggatccgatctggtactgcatgcacgcaatgctagctgcccctttcccgtcctgggtaccccgagtctcccccgacctcgggtcccaggtatgctcccacctccacctgccccactcaccacctctgctagttccagacacctcccaagcacgcagcaatgcagctcaaaacgcttagcctagccacacccccacgggaaacagcagtgattaacctttagcaataaacgaaagtttaactaagctatactaaccccagggttggtcaatttcgtgccagccacaccctcgagctagcaaaaaaaaaaaaaaaaaaaaaaaaaaaaaagcatatgactaaaaaaaaaaaaaaaaaaaaaaaaaaaaaaaaaaaaaaaaaaaaaaaaaaaaaaaaaaaaaaaaaaaaaa

SEQ ID NO: 1009 - RNA, 2099 nt, synthetic construct
  source 1..2099: mol_type = other RNA
agaataaactagtattcttctggtccccacagactcagagagaacccgccaccatggattggatctggcgcatcctgtttctcgtgggagctgccacaggcgcccactctcaagttcacctgacacagtctggccccgaagtgcggaagcctggcacaagcgtgaaggtgtcctgtaaagcccctggcaacaccctgaaaacctacgacctgcactgggtccgatctgtgcctggacaaggactgcagtggatgggctggattagccacgagggcgacaagaaagtgatcgtggaacggttcaaggccaaagtgaccatcgactgggacagaagcaccaacaccgcctacctgcagctgagcggactgacatctggcgataccgccgtgtactactgtgccaagggcagcaagcaccggctgagagattacgccctgtacgacgatgacggcgccctgaattgggccgtcgatgtggactacctgagcaacctggaattctggggccagggaacagccgtgacagtgtcttccggtggcggaggaagcggaggcggaggttcaggcggcggaggctctggcggtggtggatctgattttgtgctgacacagagccctcacagcctgagcgttacacctggcgagagcgccagcatcagctgcaagtctagccactctctgatccacggcgaccggaacaactacctggcttggtacgtgcagaagcccggcagatctcctcagctgctgatctacctggccagcagcagagctagcggcgtgccagatagattttctggcagcggcagcgacaaggatttcaccctgaagatctccagagtggaaaccgaggacgtgggcacctactactgtatgcagggcagagagagcccctggacatttggccagggcaccaaggtggacatcaaaggtggcggtggttctggcggaggcggaagtggcggcggtgggtccggaggtggtggatctgaacctaagagcagcgacaagacccacacctgtcctccatgtcctgctccagaactgctgggcggaccttccgtgttcctgtttcctccaaagcctaaggacaccctgatgatcagcagaacccctgaagtgacctgcgtggtggtggatgtgtctcacgaggaccctgaagtgaagttcaattggtacgtggacggcgtggaagtgcacaacgccaagaccaagcctagagaggaacagtacaacagcacctacagagtggtgtccgtgctgaccgtgctgcaccaggattggctgaacggcaaagagtacaagtgcaaggtgtccaacaaggccctgcctgcccctgaggaaaagaccatcagcaaggccaagggccagcctagggaaccccaagtctgtacactgcctcctagccgcgaggaaatgaccaagaaccaggtgtccctgagctgcgccgtgaagggcttttacccttccgatatcgccgtggaatgggagagcaatggccagcctgagaacaactacaagacaacccctcctgtgctggacagcgacggctcattcttcctggtgtccaagctgacagtggacaagagcagatggcagcagggcaacgtgttcagctgctctgtgctgcacgaagccctgcacagccactacacccagaagtccctgtctctgagccccggcaagtgataaggatccgatctggtactgcatgcacgcaatgctagctgcccctttcccgtcctgggtaccccgagtctcccccgacctcgggtcccaggtatgctcccacctccacctgccccactcaccacctctgctagttccagacacctcccaagcacgcagcaatgcagctcaaaacgcttagcctagccacacccccacgggaaacagcagtgattaacctttagcaataaacgaaagtttaactaagctatactaaccccagggttggtcaatttcgtgccagccacaccctcgagctagcaaaaaaaaaaaaaaaaaaaaaaaaaaaaaagcatatgactaaaaaaaaaaaaaaaaaaaaaaaaaaaaaaaaaaaaaaaaaaaaaaaaaaaaaaaaaaaaaaaaaaaaaa

SEQ ID NO: 1010 - RNA, 2099 nt, synthetic construct
  source 1..2099: mol_type = other RNA
agaataaactagtattcttctggtccccacagactcagagagaacccgccaccatggattggatctggcgcatcctgtttctcgtgggagctgccacaggcgcccactctcaagttcacctgacacagtctggccccgaagtgcggaagcctggcacaagcgtgaaggtgtcctgtaaagcccctggcaacaccctgaaaacctacgacctgcactgggtccgatctgtgcctggacaaggactgcagtggatgggctggattagccacgagggcgacaagaaagtgatcgtggaacggttcaaggccaaagtgaccatcgactgggacagaagcaccaacaccgcctacctgcagctgagcggactgacatctggcgataccgccgtgtactactgtgccaagggcagcaagcaccggctgagagattacgccctgtacgacgatgacggcgccctgaattgggccgtcgatgtggactacctgagcaacctggaattctggggccagggaacagccgtgacagtgtcttccggtggcggaggaagcggaggcggaggttcaggcggcggaggctctggcggtggtggatctgattttgtgctgacacagagccctcacagcctgagcgttacacctggcgagagcgccagcatcagctgcaagtctagccactctctgatccacggcgaccggaacaactacctggcttggtacgtgcagaagcccggcagatctcctcagctgctgatctacctggccagcagcagagctagcggcgtgccagatagattttctggcagcggcagcgacaaggatttcaccctgaagatctccagagtggaaaccgaggacgtgggcacctactactgtatgcagggcagagagagcccctggacatttggccagggcaccaaggtggacatcaaaggtggcggtggttctggcggaggcggaagtggcggcggtgggtccggaggtggtggatctgaacctaagagcagcgacaagacccacacctgtcctccatgtcctgctccagaactgctcggcggaccttccgtgttcctgtttcctccaaagcctaaggacaccctgatgatcagcagaacccctgaagtgacctgcgtggtggtggatgtgtctcacgaggaccccgaagtgaagttcaattggtacgtggacggcgtggaagtgcacaacgccaagaccaagcctagagaggaacagtacaacagcacctacagagtggtgtccgtgctgacagtgctgcaccaggattggctgaacggcaaagagtacaagtgcaaggtgtccaacaaggccctgcctgctcctatcgagaaaaccatcagcaaggccaagggccagcctagggaaccccaggtttacaccctgcctccatgccgcgaggaaatgaccaagaaccaggtgtccctgtggtgcctcgtgaagggcttctacccttccgatatcgccgtggaatgggagagcaatggccagcctgagaacaactacaagacaacccctcctgtgctggacagcgacggctcattcttcctgtacagcaagctgaccgtggacaagtccagatggcagcagggcaacgtgttcagctgtagcgtgctgcacgaagccctgcacagccactacacccagaagtccctgtctctgagccccggcaagtgataaggatccgatctggtactgcatgcacgcaatgctagctgcccctttcccgtcctgggtaccccgagtctcccccgacctcgggtcccaggtatgctcccacctccacctgccccactcaccacctctgctagttccagacacctcccaagcacgcagcaatgcagctcaaaacgcttagcctagccacacccccacgggaaacagcagtgattaacctttagcaataaacgaaagtttaactaagctatactaaccccagggttggtcaatttcgtgccagccacaccctcgagctagcaaaaaaaaaaaaaaaaaaaaaaaaaaaaaagcatatgactaaaaaaaaaaaaaaaaaaaaaaaaaaaaaaaaaaaaaaaaaaaaaaaaaaaaaaaaaaaaaaaaaaaaaa

SEQ ID NO: 1011 - RNA, 2099 nt, synthetic construct
  source 1..2099: mol_type = other RNA
agaataaactagtattcttctggtccccacagactcagagagaacccgccaccatggattggatctggcgcatcctgtttctcgtgggagctgccacaggcgcccactctcaagttcacctgacacagtctggccccgaagtgcggaagcctggcacaagcgtgaaggtgtcctgtaaagcccctggcaacaccctgaaaacctacgacctgcactgggtccgatctgtgcctggacaaggactgcagtggatgggctggattagccacgagggcgacaagaaagtgatcgtggaacggttcaaggccaaagtgaccatcgactgggacagaagcaccaacaccgcctacctgcagctgagcggactgacatctggcgataccgccgtgtactactgtgccaagggcagcaagcaccggctgagagattacgccctgtacgacgatgacggcgccctgaattgggccgtcgatgtggactacctgagcaacctggaattctggggccagggaacagccgtgacagtgtcttccggtggcggaggaagcggaggcggaggttcaggcggcggaggctctggcggtggtggatctgattttgtgctgacacagagccctcacagcctgagcgttacacctggcgagagcgccagcatcagctgcaagtctagccactctctgatccacggcgaccggaacaactacctggcttggtacgtgcagaagcccggcagatctcctcagctgctgatctacctggccagcagcagagctagcggcgtgccagatagattttctggcagcggcagcgacaaggatttcaccctgaagatctccagagtggaaaccgaggacgtgggcacctactactgtatgcagggcagagagagcccctggacatttggccagggcaccaaggtggacatcaaaggtggcggtggttctggcggaggcggaagtggcggcggtgggtccggaggtggtggatctgaacctaagagcagcgacaagacccacacctgtcctccatgtcctgctccagaactgctggccggaccttccgtgttcctgtttcctccaaagcctaaggacaccctgatgatcagcagaacccctgaagtgacctgcgtggtggtggatgtgtctcacgaggaccccgaagtgaagttcaattggtacgtggacggcgtggaagtgcacaatgccaagaccaagcctagagaggaacagtacaacagcacctacagagtggtgtccgtgctgaccgtgctgcaccaggattggctgaacggcaaagagtacaagtgcaaggtgtccaacaaggccctgcctctgcctgaggaaaagaccatcagcaaggccaagggccagcctagggaaccccaggtttacaccctgcctccatgccgcgaggaaatgaccaagaaccaggtgtccctgtggtgcctcgtgaagggcttctacccttccgatatcgccgtggaatgggagagcaatggccagcctgagaacaactacaagacaacccctcctgtgctggacagcgacggctcattcttcctgtacagcaagctgaccgtggacaagtccagatggcagcagggcaacgtgttcagctgtagcgtgctgcacgaagccctgcacagccactacacccagaagtccctgtctctgagccccggcaagtgataaggatccgatctggtactgcatgcacgcaatgctagctgcccctttcccgtcctgggtaccccgagtctcccccgacctcgggtcccaggtatgctcccacctccacctgccccactcaccacctctgctagttccagacacctcccaagcacgcagcaatgcagctcaaaacgcttagcctagccacacccccacgggaaacagcagtgattaacctttagcaataaacgaaagtttaactaagctatactaaccccagggttggtcaatttcgtgccagccacaccctcgagctagcaaaaaaaaaaaaaaaaaaaaaaaaaaaaaagcatatgactaaaaaaaaaaaaaaaaaaaaaaaaaaaaaaaaaaaaaaaaaaaaaaaaaaaaaaaaaaaaaaaaaaaaaa

SEQ ID NO: 1012 - RNA, 2099 nt, synthetic construct
  source 1..2099: mol_type = other RNA
agaataaactagtattcttctggtccccacagactcagagagaacccgccaccatggattggatctggcgcatcctgtttctcgtgggagctgccacaggcgcccactctcaagttcacctgacacagtctggccccgaagtgcggaagcctggcacaagcgtgaaggtgtcctgtaaagcccctggcaacaccctgaaaacctacgacctgcactgggtccgatctgtgcctggacaaggactgcagtggatgggctggattagccacgagggcgacaagaaagtgatcgtggaacggttcaaggccaaagtgaccatcgactgggacagaagcaccaacaccgcctacctgcagctgagcggactgacatctggcgataccgccgtgtactactgtgccaagggcagcaagcaccggctgagagattacgccctgtacgacgatgacggcgccctgaattgggccgtcgatgtggactacctgagcaacctggaattctggggccagggaacagccgtgacagtgtcttccggtggcggaggaagcggaggcggaggttcaggcggcggaggctctggcggtggtggatctgattttgtgctgacacagagccctcacagcctgagcgttacacctggcgagagcgccagcatcagctgcaagtctagccactctctgatccacggcgaccggaacaactacctggcttggtacgtgcagaagcccggcagatctcctcagctgctgatctacctggccagcagcagagctagcggcgtgccagatagattttctggcagcggcagcgacaaggatttcaccctgaagatctccagagtggaaaccgaggacgtgggcacctactactgtatgcagggcagagagagcccctggacatttggccagggcaccaaggtggacatcaaaggtggcggtggttctggcggaggcggaagtggcggcggtgggtccggaggtggtggatctgaacctaagagcagcgacaagacccacacctgtcctccatgtcctgctccagaactgctggccggaccttccgtgttcctgtttcctccaaagcctaaggacaccctgatgatcagcagaacccctgaagtgacctgcgtggtggtggatgtgtctcacgaggaccctgaagtgaagttcaattggtacgtggacggcgtggaagtgcacaacgccaagaccaagcctagagaggaacagtacaacagcacctacagagtggtgtccgtgctgaccgtgctgcaccaggattggctgaacggcaaagagtacaagtgcaaggtgtccaacaaggccctgcctgcccctgaggaaaagaccatcagcaaggccaagggccagcctagggaaccccaggtttacaccctgcctccatgccgcgaggaaatgaccaagaaccaggtgtccctgtggtgcctcgtgaagggcttctacccttccgatatcgccgtggaatgggagagcaatggccagcctgagaacaactacaagacaacccctcctgtgctggacagcgacggctcattcttcctgtacagcaagctgaccgtggacaagtccagatggcagcagggcaacgtgttcagctgtagcgtgctgcacgaagccctgcacagccactacacccagaagtccctgtctctgagccccggcaagtgataaggatccgatctggtactgcatgcacgcaatgctagctgcccctttcccgtcctgggtaccccgagtctcccccgacctcgggtcccaggtatgctcccacctccacctgccccactcaccacctctgctagttccagacacctcccaagcacgcagcaatgcagctcaaaacgcttagcctagccacacccccacgggaaacagcagtgattaacctttagcaataaacgaaagtttaactaagctatactaaccccagggttggtcaatttcgtgccagccacaccctcgagctagcaaaaaaaaaaaaaaaaaaaaaaaaaaaaaagcatatgactaaaaaaaaaaaaaaaaaaaaaaaaaaaaaaaaaaaaaaaaaaaaaaaaaaaaaaaaaaaaaaaaaaaaaa

SEQ ID NO: 1013 - RNA, 2099 nt, synthetic construct
  source 1..2099: mol_type = other RNA
agaataaactagtattcttctggtccccacagactcagagagaacccgccaccatggattggatctggcgcatcctgtttctcgtgggagctgccacaggcgcccactctcaagttcacctgacacagtctggccccgaagtgcggaagcctggcacaagcgtgaaggtgtcctgtaaagcccctggcaacaccctgaaaacctacgacctgcactgggtccgatctgtgcctggacaaggactgcagtggatgggctggattagccacgagggcgacaagaaagtgatcgtggaacggttcaaggccaaagtgaccatcgactgggacagaagcaccaacaccgcctacctgcagctgagcggactgacatctggcgataccgccgtgtactactgtgccaagggcagcaagcaccggctgagagattacgccctgtacgacgatgacggcgccctgaattgggccgtcgatgtggactacctgagcaacctggaattctggggccagggaacagccgtgacagtgtcttccggtggcggaggaagcggaggcggaggttcaggcggcggaggctctggcggtggtggatctgattttgtgctgacacagagccctcacagcctgagcgttacacctggcgagagcgccagcatcagctgcaagtctagccactctctgatccacggcgaccggaacaactacctggcttggtacgtgcagaagcccggcagatctcctcagctgctgatctacctggccagcagcagagctagcggcgtgccagatagattttctggcagcggcagcgacaaggatttcaccctgaagatctccagagtggaaaccgaggacgtgggcacctactactgtatgcagggcagagagagcccctggacatttggccagggcaccaaggtggacatcaaaggtggcggtggttctggcggaggcggaagtggcggcggtgggtccggaggtggtggatctgaacctaagagcagcgacaagacccacacctgtcctccatgtcctgctccagaactgctggccggaccttccgtgttcctgtttcctccaaagcctaaggacaccctgatgatcagcagaacccctgaagtgacctgcgtggtggtggatgtgtctcacgaggaccctgaagtgaagttcaattggtacgtggacggcgtggaagtgcacaacgccaagaccaagcctagagaggaacagtacaacagcacctacagagtggtgtccgtgctgaccgtgctgcaccaggattggctgaacggcaaagagtacaagtgcaaggtgtccaacaaggccctgcctgcccctatcgaaaagaccatcagcaaggccaagggccagcctagggaaccccaggtttacaccctgcctccatgccgcgaggaaatgaccaagaaccaggtgtccctgtggtgcctcgtgaagggcttctacccttccgatatcgccgtggaatgggagagcaatggccagcctgagaacaactacaagacaacccctcctgtgctggacagcgacggctcattcttcctgtacagcaagctgaccgtggacaagtccagatggcagcagggcaacgtgttcagctgtagcgtgctgcacgaagccctgcacagccactacacccagaagtccctgtctctgagccccggcaagtgataaggatccgatctggtactgcatgcacgcaatgctagctgcccctttcccgtcctgggtaccccgagtctcccccgacctcgggtcccaggtatgctcccacctccacctgccccactcaccacctctgctagttccagacacctcccaagcacgcagcaatgcagctcaaaacgcttagcctagccacacccccacgggaaacagcagtgattaacctttagcaataaacgaaagtttaactaagctatactaaccccagggttggtcaatttcgtgccagccacaccctcgagctagcaaaaaaaaaaaaaaaaaaaaaaaaaaaaaagcatatgactaaaaaaaaaaaaaaaaaaaaaaaaaaaaaaaaaaaaaaaaaaaaaaaaaaaaaaaaaaaaaaaaaaaaaa

SEQ ID NO: 1014 - RNA, 2099 nt, synthetic construct
  source 1..2099: mol_type = other RNA
agaataaactagtattcttctggtccccacagactcagagagaacccgccaccatggattggatctggcgcatcctgtttctcgtgggagctgccacaggcgcccactctcaagttcacctgacacagtctggccccgaagtgcggaagcctggcacaagcgtgaaggtgtcctgtaaagcccctggcaacaccctgaaaacctacgacctgcactgggtccgatctgtgcctggacaaggactgcagtggatgggctggattagccacgagggcgacaagaaagtgatcgtggaacggttcaaggccaaagtgaccatcgactgggacagaagcaccaacaccgcctacctgcagctgagcggactgacatctggcgataccgccgtgtactactgtgccaagggcagcaagcaccggctgagagattacgccctgtacgacgatgacggcgccctgaattgggccgtcgatgtggactacctgagcaacctggaattctggggccagggaacagccgtgacagtgtcttccggtggcggaggaagcggaggcggaggttcaggcggcggaggctctggcggtggtggatctgattttgtgctgacacagagccctcacagcctgagcgttacacctggcgagagcgccagcatcagctgcaagtctagccactctctgatccacggcgaccggaacaactacctggcttggtacgtgcagaagcccggcagatctcctcagctgctgatctacctggccagcagcagagctagcggcgtgccagatagattttctggcagcggcagcgacaaggatttcaccctgaagatctccagagtggaaaccgaggacgtgggcacctactactgtatgcagggcagagagagcccctggacatttggccagggcaccaaggtggacatcaaaggtggcggtggttctggcggaggcggaagtggcggcggtgggtccggaggtggtggatctgaacctaagagcagcgacaagacccacacctgtcctccatgtcctgctccagaactgctgggcggaccttccgtgttcctgtttcctccaaagcctaaggacaccctgatgatcagcagaacccctgaagtgacctgcgtggtggtggatgtgtctcacgaggaccctgaagtgaagttcaattggtacgtggacggcgtggaagtgcacaacgccaagaccaagcctagagaggaacagtacaacagcacctacagagtggtgtccgtgctgaccgtgctgcaccaggattggctgaacggcaaagagtacaagtgcaaggtgtccaacaaggccctgcctgcccctgaggaaaagaccatcagcaaggccaagggccagcctagggaaccccaggtttacaccctgcctccatgccgcgaggaaatgaccaagaaccaggtgtccctgtggtgcctcgtgaagggcttctacccttccgatatcgccgtggaatgggagagcaatggccagcctgagaacaactacaagacaacccctcctgtgctggacagcgacggctcattcttcctgtacagcaagctgaccgtggacaagtccagatggcagcagggcaacgtgttcagctgtagcgtgctgcacgaagccctgcacagccactacacccagaagtccctgtctctgagccccggcaagtgataaggatccgatctggtactgcatgcacgcaatgctagctgcccctttcccgtcctgggtaccccgagtctcccccgacctcgggtcccaggtatgctcccacctccacctgccccactcaccacctctgctagttccagacacctcccaagcacgcagcaatgcagctcaaaacgcttagcctagccacacccccacgggaaacagcagtgattaacctttagcaataaacgaaagtttaactaagctatactaaccccagggttggtcaatttcgtgccagccacaccctcgagctagcaaaaaaaaaaaaaaaaaaaaaaaaaaaaaagcatatgactaaaaaaaaaaaaaaaaaaaaaaaaaaaaaaaaaaaaaaaaaaaaaaaaaaaaaaaaaaaaaaaaaaaaaa

SEQ ID NO: 1015 - RNA, 2099 nt, synthetic construct; identical to SEQ ID NO: 999
  source 1..2099: mol_type = other RNA

SEQ ID NO: 1016 - RNA, 2099 nt, synthetic construct; identical to SEQ ID NO: 1000
  source 1..2099: mol_type = other RNA

SEQ ID NO: 1017 - RNA, 2099 nt, synthetic construct; identical to SEQ ID NO: 1001
  source 1..2099: mol_type = other RNA

SEQ ID NO: 1018 - RNA, 2099 nt, synthetic construct; identical to SEQ ID NO: 1002
  source 1..2099: mol_type = other RNA

SEQ ID NO: 1019 - RNA, 2099 nt, synthetic construct; identical to SEQ ID NO: 1003
  source 1..2099: mol_type = other RNA

SEQ ID NO: 1020 - RNA, 2099 nt, synthetic construct; identical to SEQ ID NO: 1004
  source 1..2099: mol_type = other RNA

SEQ ID NO: 1021 - RNA, 2099 nt, synthetic construct; identical to SEQ ID NO: 1005
  source 1..2099: mol_type = other RNA

SEQ ID NO: 1022 - RNA, 2099 nt, synthetic construct; identical to SEQ ID NO: 1006
  source 1..2099: mol_type = other RNA

SEQ ID NO: 1023 - RNA, 2099 nt, synthetic construct; identical to SEQ ID NO: 1007
  source 1..2099: mol_type = other RNA

SEQ ID NO: 1024 - RNA, 2099 nt, synthetic construct; identical to SEQ ID NO: 1008
  source 1..2099: mol_type = other RNA

SEQ ID NO: 1025 - RNA, 2099 nt, synthetic construct; identical to SEQ ID NO: 1009
  source 1..2099: mol_type = other RNA

SEQ ID NO: 1026 - RNA, 2099 nt, synthetic construct; identical to SEQ ID NO: 1010
  source 1..2099: mol_type = other RNA

SEQ ID NO: 1027 - RNA, 2099 nt, synthetic construct; identical to SEQ ID NO: 1011
  source 1..2099: mol_type = other RNA

SEQ ID NO: 1028 - RNA, 2099 nt, synthetic construct; identical to SEQ ID NO: 1012
  source 1..2099: mol_type = other RNA

SEQ ID NO: 1029 - RNA, 2099 nt, synthetic construct; identical to SEQ ID NO: 1013
  source 1..2099: mol_type = other RNA

SEQ ID NO: 1030 - RNA, 2099 nt, synthetic construct; identical to SEQ ID NO: 1014
  source 1..2099: mol_type = other RNA

SEQ ID NO: 1031 - RNA, 2099 nt, synthetic construct
  source 1..2099: mol_type = other RNA
agaataaactagtattcttctggtccccacagactcagagagaacccgccaccatggattggatctggcgcatcctgtttctcgtgggagctgccacaggcgcccactctcaagttcacctgacacagtctggccccgaagtgcggaagcctggcacaagcgtgaaggtgtcctgtaaagcccctggcaacaccctgaaaacctacgacctgcactgggtccgatctgtgcctggacaaggactgcagtggatgggctggattagccacgagggcgacaagaaagtgatcgtggaacggttcaaggccaaagtgaccatcgactgggacagaagcaccaacaccgcctacctgcagctgagcggactgacatctggcgataccgccgtgtactactgtgccaagggcagcaagcaccggctgagagattacgccctgtacgacgatgacggcgccctgaattgggccgtcgatgtggactacctgagcaacctggaattctggggccagggaacagccgtgacagtgtcttccggtggcggaggaagcggaggcggaggttcaggcggcggaggctctggcggtggtggatctgattttgtgctgacacagagccctcacagcctgagcgttacacctggcgagagcgccagcatcagctgcaagtctagccactctctgatccacggcgaccggaacaactacctggcttggtacgtgcagaagcccggcagatctcctcagctgctgatctacctggccagcagcagagctagcggcgtgccagatagattttctggcagcggcagcgacaaggatttcaccctgaagatctccagagtggaaaccgaggacgtgggcacctactactgtatgcagggcagagagagcccctggacatttggccagggcaccaaggtggacatcaaaggtggcggtggttctggcggaggcggaagtggcggcggtgggtccggaggtggtggatctgaacctaagagcagcgacaagacccacacctgtcctccatgtcctgctccagaactgctcggcggaccttccgtgttcctgtttcctccaaagcctaaggacaccctgatgatcagcagaacccctgaagtgacctgcgtggtggtggatgtgtctcacgaggaccccgaagtgaagttcaattggtacgtggacggcgtggaagtgcacaacgccaagaccaagcctagagaggaacagtacaacagcacctacagagtggtgtccgtgctgacagtgctgcaccaggattggctgaacggcaaagagtacaagtgcaaggtgtccaacaaggccctgcctgctcctatcgagaaaaccatcagcaaggccaagggccagcctagggaaccccaggtttacacactgcctccaagccgcgacgaactgaccaagaaccaggtgtccctgacctgcctcgtgaagggcttctacccttccgatatcgccgtggaatgggagagcaatggccagcctgagaacaactacaagacaacccctcctgtgctggacagcgacggctcattcttcctgtacagcaagctgactgtggataagtcccggtggcagcagggcaacgtgttcagctgttctgtgatgcacgaagccctgcacaaccactacacccagaaaagcctgtctctgagccccggcaagtgataaggatccgatctggtactgcatgcacgcaatgctagctgcccctttcccgtcctgggtaccccgagtctcccccgacctcgggtcccaggtatgctcccacctccacctgccccactcaccacctctgctagttccagacacctcccaagcacgcagcaatgcagctcaaaacgcttagcctagccacacccccacgggaaacagcagtgattaacctttagcaataaacgaaagtttaactaagctatactaaccccagggttggtcaatttcgtgccagccacaccctcgagctagcaaaaaaaaaaaaaaaaaaaaaaaaaaaaaagcatatgactaaaaaaaaaaaaaaaaaaaaaaaaaaaaaaaaaaaaaaaaaaaaaaaaaaaaaaaaaaaaaaaaaaaaaa

SEQ ID NO: 1032 - RNA, 2099 nt, synthetic construct
  source 1..2099: mol_type = other RNA
agaataaactagtattcttctggtccccacagactcagagagaacccgccaccatggattggatctggcgcatcctgtttctcgtgggagctgccacaggcgcccactctcaagttcacctgacacagtctggccccgaagtgcggaagcctggcacaagcgtgaaggtgtcctgtaaagcccctggcaacaccctgaaaacctacgacctgcactgggtccgatctgtgcctggacaaggactgcagtggatgggctggattagccacgagggcgacaagaaagtgatcgtggaacggttcaaggccaaagtgaccatcgactgggacagaagcaccaacaccgcctacctgcagctgagcggactgacatctggcgataccgccgtgtactactgtgccaagggcagcaagcaccggctgagagattacgccctgtacgacgatgacggcgccctgaattgggccgtcgatgtggactacctgagcaacctggaattctggggccagggaacagccgtgacagtgtcttccggtggcggaggaagcggaggcggaggttcaggcggcggaggctctggcggtggtggatctgattttgtgctgacacagagccctcacagcctgagcgttacacctggcgagagcgccagcatcagctgcaagtctagccactctctgatccacggcgaccggaacaactacctggcttggtacgtgcagaagcccggcagatctcctcagctgctgatctacctggccagcagcagagctagcggcgtgccagatagattttctggcagcggcagcgacaaggatttcaccctgaagatctccagagtggaaaccgaggacgtgggcacctactactgtatgcagggcagagagagcccctggacatttggccagggcaccaaggtggacatcaaaggtggcggtggttctggcggaggcggaagtggcggcggtgggtccggaggtggtggatctgaacctaagagcagcgacaagacccacacctgtcctccatgtcctgctccagaactgctcggcggaccttccgtgttcctgtttcctccaaagcctaaggacaccctgatgatcagcagaacccctgaagtgacctgcgtggtggtggatgtgtctcacgaggaccccgaagtgaagttcaattggtacgtggacggcgtggaagtgcacaacgccaagaccaagcctagagaggaacagtacaacagcacctacagagtggtgtccgtgctgacagtgctgcaccaggattggctgaacggcaaagagtacaagtgcaaggtgtccaacaaggccctgcctgctcctatcgagaaaaccatcagcaaggccaagggccagcctagggaaccccaggtttacacactgcctccaagccgcgacgaactgaccaagaaccaggtgtccctgacctgcctcgtgaagggcttctacccttccgatatcgccgtggaatgggagagcaatggccagcctgagaacaactacaagacaacccctcctgtgctggacagcgacggctcattcttcctgtacagcaagctgaccgtggacaagtccagatggcagcagggcaacgtgttcagctgtagcgtgctgcacgaagccctgcacagccactacacccagaaaagcctgtctctgagccccggcaaatgataaggatccgatctggtactgcatgcacgcaatgctagctgcccctttcccgtcctgggtaccccgagtctcccccgacctcgggtcccaggtatgctcccacctccacctgccccactcaccacctctgctagttccagacacctcccaagcacgcagcaatgcagctcaaaacgcttagcctagccacacccccacgggaaacagcagtgattaacctttagcaataaacgaaagtttaactaagctatactaaccccagggttggtcaatttcgtgccagccacaccctcgagctagcaaaaaaaaaaaaaaaaaaaaaaaaaaaaaagcatatgactaaaaaaaaaaaaaaaaaaaaaaaaaaaaaaaaaaaaaaaaaaaaaaaaaaaaaaaaaaaaaaaaaaaaaa

SEQ ID NO: 1033 - RNA, 2099 nt, synthetic construct
  source 1..2099: mol_type = other RNA
agaataaactagtattcttctggtccccacagactcagagagaacccgccaccatggattggatctggcgcatcctgtttctcgtgggagctgccacaggcgcccactctcaagttcacctgacacagtctggccccgaagtgcggaagcctggcacaagcgtgaaggtgtcctgtaaagcccctggcaacaccctgaaaacctacgacctgcactgggtccgatctgtgcctggacaaggactgcagtggatgggctggattagccacgagggcgacaagaaagtgatcgtggaacggttcaaggccaaagtgaccatcgactgggacagaagcaccaacaccgcctacctgcagctgagcggactgacatctggcgataccgccgtgtactactgtgccaagggcagcaagcaccggctgagagattacgccctgtacgacgatgacggcgccctgaattgggccgtcgatgtggactacctgagcaacctggaattctggggccagggaacagccgtgacagtgtcttccggtggcggaggaagcggaggcggaggttcaggcggcggaggctctggcggtggtggatctgattttgtgctgacacagagccctcacagcctgagcgttacacctggcgagagcgccagcatcagctgcaagtctagccactctctgatccacggcgaccggaacaactacctggcttggtacgtgcagaagcccggcagatctcctcagctgctgatctacctggccagcagcagagctagcggcgtgccagatagattttctggcagcggcagcgacaaggatttcaccctgaagatctccagagtggaaaccgaggacgtgggcacctactactgtatgcagggcagagagagcccctggacatttggccagggcaccaaggtggacatcaaaggtggcggtggttctggcggaggcggaagtggcggcggtgggtccggaggtggtggatctgaacctaagagcagcgacaagacccacacctgtcctccatgtcctgctccagaactgctggccggaccttccgtgttcctgtttcctccaaagcctaaggacaccctgatgatcagcagaacccctgaagtgacctgcgtggtggtggatgtgtctcacgaggaccccgaagtgaagttcaattggtacgtggacggcgtggaagtgcacaatgccaagaccaagcctagagaggaacagtacaacagcacctacagagtggtgtccgtgctgaccgtgctgcaccaggattggctgaacggcaaagagtacaagtgcaaggtgtccaacaaggccctgcctctgcctgaggaaaagaccatcagcaaggccaagggccagcctagggaaccccaggtttacacactgcctccaagccgcgacgaactgaccaagaaccaggtgtccctgacctgcctcgtgaagggcttctacccttccgatatcgccgtggaatgggagagcaatggccagcctgagaacaactacaagacaacccctcctgtgctggacagcgacggctcattcttcctgtacagcaagctgaccgtggacaagtccagatggcagcagggcaacgtgttcagctgtagcgtgctgcacgaagccctgcacagccactacacccagaaaagcctgtctctgagccccggcaaatgataaggatccgatctggtactgcatgcacgcaatgctagctgcccctttcccgtcctgggtaccccgagtctcccccgacctcgggtcccaggtatgctcccacctccacctgccccactcaccacctctgctagttccagacacctcccaagcacgcagcaatgcagctcaaaacgcttagcctagccacacccccacgggaaacagcagtgattaacctttagcaataaacgaaagtttaactaagctatactaaccccagggttggtcaatttcgtgccagccacaccctcgagctagcaaaaaaaaaaaaaaaaaaaaaaaaaaaaaagcatatgactaaaaaaaaaaaaaaaaaaaaaaaaaaaaaaaaaaaaaaaaaaaaaaaaaaaaaaaaaaaaaaaaaaaaaa

SEQ ID NO: 1034 - RNA, 2099 nt, synthetic construct
  source 1..2099: mol_type = other RNA
agaataaactagtattcttctggtccccacagactcagagagaacccgccaccatggattggatctggcgcatcctgtttctcgtgggagctgccacaggcgcccactctcaagttcacctgacacagtctggccccgaagtgcggaagcctggcacaagcgtgaaggtgtcctgtaaagcccctggcaacaccctgaaaacctacgacctgcactgggtccgatctgtgcctggacaaggactgcagtggatgggctggattagccacgagggcgacaagaaagtgatcgtggaacggttcaaggccaaagtgaccatcgactgggacagaagcaccaacaccgcctacctgcagctgagcggactgacatctggcgataccgccgtgtactactgtgccaagggcagcaagcaccggctgagagattacgccctgtacgacgatgacggcgccctgaattgggccgtcgatgtggactacctgagcaacctggaattctggggccagggaacagccgtgacagtgtcttccggtggcggaggaagcggaggcggaggttcaggcggcggaggctctggcggtggtggatctgattttgtgctgacacagagccctcacagcctgagcgttacacctggcgagagcgccagcatcagctgcaagtctagccactctctgatccacggcgaccggaacaactacctggcttggtacgtgcagaagcccggcagatctcctcagctgctgatctacctggccagcagcagagctagcggcgtgccagatagattttctggcagcggcagcgacaaggatttcaccctgaagatctccagagtggaaaccgaggacgtgggcacctactactgtatgcagggcagagagagcccctggacatttggccagggcaccaaggtggacatcaaaggtggcggtggttctggcggaggcggaagtggcggcggtgggtccggaggtggtggatctgaacctaagagcagcgacaagacccacacctgtcctccatgtcctgctccagaactgctggccggaccttccgtgttcctgtttcctccaaagcctaaggacaccctgatgatcagcagaacccctgaagtgacctgcgtggtggtggatgtgtctcacgaggaccctgaagtgaagttcaattggtacgtggacggcgtggaagtgcacaacgccaagaccaagcctagagaggaacagtacaacagcacctacagagtggtgtccgtgctgaccgtgctgcaccaggattggctgaacggcaaagagtacaagtgcaaggtgtccaacaaggccctgcctgcccctgaggaaaagaccatcagcaaggccaagggccagcctagggaaccccaggtttacacactgcctccaagccgcgacgaactgaccaagaaccaggtgtccctgacctgcctcgtgaagggcttctacccttccgatatcgccgtggaatgggagagcaatggccagcctgagaacaactacaagacaacccctcctgtgctggacagcgacggctcattcttcctgtacagcaagctgaccgtggacaagtccagatggcagcagggcaacgtgttcagctgtagcgtgctgcacgaagccctgcacagccactacacccagaaaagcctgtctctgagccccggcaaatgataaggatccgatctggtactgcatgcacgcaatgctagctgcccctttcccgtcctgggtaccccgagtctcccccgacctcgggtcccaggtatgctcccacctccacctgccccactcaccacctctgctagttccagacacctcccaagcacgcagcaatgcagctcaaaacgcttagcctagccacacccccacgggaaacagcagtgattaacctttagcaataaacgaaagtttaactaagctatactaaccccagggttggtcaatttcgtgccagccacaccctcgagctagcaaaaaaaaaaaaaaaaaaaaaaaaaaaaaagcatatgactaaaaaaaaaaaaaaaaaaaaaaaaaaaaaaaaaaaaaaaaaaaaaaaaaaaaaaaaaaaaaaaaaaaaaa

SEQ ID NO: 1035 - RNA, 2099 nt, synthetic construct
  source 1..2099: mol_type = other RNA
agaataaactagtattcttctggtccccacagactcagagagaacccgccaccatggattggatctggcgcatcctgtttctcgtgggagctgccacaggcgcccactctcaagttcacctgacacagtctggccccgaagtgcggaagcctggcacaagcgtgaaggtgtcctgtaaagcccctggcaacaccctgaaaacctacgacctgcactgggtccgatctgtgcctggacaaggactgcagtggatgggctggattagccacgagggcgacaagaaagtgatcgtggaacggttcaaggccaaagtgaccatcgactgggacagaagcaccaacaccgcctacctgcagctgagcggactgacatctggcgataccgccgtgtactactgtgccaagggcagcaagcaccggctgagagattacgccctgtacgacgatgacggcgccctgaattgggccgtcgatgtggactacctgagcaacctggaattctggggccagggaacagccgtgacagtgtcttccggtggcggaggaagcggaggcggaggttcaggcggcggaggctctggcggtggtggatctgattttgtgctgacacagagccctcacagcctgagcgttacacctggcgagagcgccagcatcagctgcaagtctagccactctctgatccacggcgaccggaacaactacctggcttggtacgtgcagaagcccggcagatctcctcagctgctgatctacctggccagcagcagagctagcggcgtgccagatagattttctggcagcggcagcgacaaggatttcaccctgaagatctccagagtggaaaccgaggacgtgggcacctactactgtatgcagggcagagagagcccctggacatttggccagggcaccaaggtggacatcaaaggtggcggtggttctggcggaggcggaagtggcggcggtgggtccggaggtggtggatctgaacctaagagcagcgacaagacccacacctgtcctccatgtcctgctccagaactgctggccggaccttccgtgttcctgtttcctccaaagcctaaggacaccctgatgatcagcagaacccctgaagtgacctgcgtggtggtggatgtgtctcacgaggaccctgaagtgaagttcaattggtacgtggacggcgtggaagtgcacaacgccaagaccaagcctagagaggaacagtacaacagcacctacagagtggtgtccgtgctgaccgtgctgcaccaggattggctgaacggcaaagagtacaagtgcaaggtgtccaacaaggccctgcctgcccctatcgaaaagaccatcagcaaggccaagggccagcctagggaaccccaggtttacacactgcctccaagccgcgacgaactgaccaagaaccaggtgtccctgacctgcctcgtgaagggcttctacccttccgatatcgccgtggaatgggagagcaatggccagcctgagaacaactacaagacaacccctcctgtgctggacagcgacggctcattcttcctgtacagcaagctgaccgtggacaagtccagatggcagcagggcaacgtgttcagctgtagcgtgctgcacgaagccctgcacagccactacacccagaaaagcctgtctctgagccccggcaaatgataaggatccgatctggtactgcatgcacgcaatgctagctgcccctttcccgtcctgggtaccccgagtctcccccgacctcgggtcccaggtatgctcccacctccacctgccccactcaccacctctgctagttccagacacctcccaagcacgcagcaatgcagctcaaaacgcttagcctagccacacccccacgggaaacagcagtgattaacctttagcaataaacgaaagtttaactaagctatactaaccccagggttggtcaatttcgtgccagccacaccctcgagctagcaaaaaaaaaaaaaaaaaaaaaaaaaaaaaagcatatgactaaaaaaaaaaaaaaaaaaaaaaaaaaaaaaaaaaaaaaaaaaaaaaaaaaaaaaaaaaaaaaaaaaaaaa

SEQ ID NO: 1036 - RNA, 2099 nt, synthetic construct
  source 1..2099: mol_type = other RNA
agaataaactagtattcttctggtccccacagactcagagagaacccgccaccatggattggatctggcgcatcctgtttctcgtgggagctgccacaggcgcccactctcaagttcacctgacacagtctggccccgaagtgcggaagcctggcacaagcgtgaaggtgtcctgtaaagcccctggcaacaccctgaaaacctacgacctgcactgggtccgatctgtgcctggacaaggactgcagtggatgggctggattagccacgagggcgacaagaaagtgatcgtggaacggttcaaggccaaagtgaccatcgactgggacagaagcaccaacaccgcctacctgcagctgagcggactgacatctggcgataccgccgtgtactactgtgccaagggcagcaagcaccggctgagagattacgccctgtacgacgatgacggcgccctgaattgggccgtcgatgtggactacctgagcaacctggaattctggggccagggaacagccgtgacagtgtcttccggtggcggaggaagcggaggcggaggttcaggcggcggaggctctggcggtggtggatctgattttgtgctgacacagagccctcacagcctgagcgttacacctggcgagagcgccagcatcagctgcaagtctagccactctctgatccacggcgaccggaacaactacctggcttggtacgtgcagaagcccggcagatctcctcagctgctgatctacctggccagcagcagagctagcggcgtgccagatagattttctggcagcggcagcgacaaggatttcaccctgaagatctccagagtggaaaccgaggacgtgggcacctactactgtatgcagggcagagagagcccctggacatttggccagggcaccaaggtggacatcaaaggtggcggtggttctggcggaggcggaagtggcggcggtgggtccggaggtggtggatctgaacctaagagcagcgacaagacccacacctgtcctccatgtcctgctccagaactgctgggcggaccttccgtgttcctgtttcctccaaagcctaaggacaccctgatgatcagcagaacccctgaagtgacctgcgtggtggtggatgtgtctcacgaggaccctgaagtgaagttcaattggtacgtggacggcgtggaagtgcacaacgccaagaccaagcctagagaggaacagtacaacagcacctacagagtggtgtccgtgctgaccgtgctgcaccaggattggctgaacggcaaagagtacaagtgcaaggtgtccaacaaggccctgcctgcccctgaggaaaagaccatcagcaaggccaagggccagcctagggaaccccaggtttacacactgcctccaagccgcgacgaactgaccaagaaccaggtgtccctgacctgcctcgtgaagggcttctacccttccgatatcgccgtggaatgggagagcaatggccagcctgagaacaactacaagacaacccctcctgtgctggacagcgacggctcattcttcctgtacagcaagctgaccgtggacaagtccagatggcagcagggcaacgtgttcagctgtagcgtgctgcacgaagccctgcacagccactacacccagaaaagcctgtctctgagccccggcaaatgataaggatccgatctggtactgcatgcacgcaatgctagctgcccctttcccgtcctgggtaccccgagtctcccccgacctcgggtcccaggtatgctcccacctccacctgccccactcaccacctctgctagttccagacacctcccaagcacgcagcaatgcagctcaaaacgcttagcctagccacacccccacgggaaacagcagtgattaacctttagcaataaacgaaagtttaactaagctatactaaccccagggttggtcaatttcgtgccagccacaccctcgagctagcaaaaaaaaaaaaaaaaaaaaaaaaaaaaaagcatatgactaaaaaaaaaaaaaaaaaaaaaaaaaaaaaaaaaaaaaaaaaaaaaaaaaaaaaaaaaaaaaaaaaaaaaa

SEQ ID NO: 1037 - RNA, 2099 nt, synthetic construct
  source 1..2099: mol_type = other RNA
agaataaactagtattcttctggtccccacagactcagagagaacccgccaccatggattggatctggcgcatcctgtttctcgtgggagctgccacaggcgcccactctcaagttcacctgacacagtctggccccgaagtgcggaagcctggcacaagcgtgaaggtgtcctgtaaagcccctggcaacaccctgaaaacctacgacctgcactgggtccgatctgtgcctggacaaggactgcagtggatgggctggattagccacgagggcgacaagaaagtgatcgtggaacggttcaaggccaaagtgaccatcgactgggacagaagcaccaacaccgcctacctgcagctgagcggactgacatctggcgataccgccgtgtactactgtgccaagggcagcaagcaccggctgagagattacgccctgtacgacgatgacggcgccctgaattgggccgtcgatgtggactacctgagcaacctggaattctggggccagggaacagccgtgacagtgtcttccggtggcggaggaagcggaggcggaggttcaggcggcggaggctctggcggtggtggatctgattttgtgctgacacagagccctcacagcctgagcgttacacctggcgagagcgccagcatcagctgcaagtctagccactctctgatccacggcgaccggaacaactacctggcttggtacgtgcagaagcccggcagatctcctcagctgctgatctacctggccagcagcagagctagcggcgtgccagatagattttctggcagcggcagcgacaaggatttcaccctgaagatctccagagtggaaaccgaggacgtgggcacctactactgtatgcagggcagagagagcccctggacatttggccagggcaccaaggtggacatcaaaggtggcggtggttctggcggaggcggaagtggcggcggtgggtccggaggtggtggatctgaacctaagagcagcgacaagacccacacctgtcctccatgtcctgctccagaactgctcggcggaccttccgtgttcctgtttcctccaaagcctaaggacaccctgatgatcagcagaacccctgaagtgacctgcgtggtggtggatgtgtctcacgaggaccccgaagtgaagttcaattggtacgtggacggcgtggaagtgcacaacgccaagaccaagcctagagaggaacagtacaacagcacctacagagtggtgtccgtgctgacagtgctgcaccaggattggctgaacggcaaagagtacaagtgcaaggtgtccaacaaggccctgcctgctcctatcgagaaaaccatcagcaaggccaagggccagcctcgcgaacctcaagtctgtacactgcctcctagccgcgacgaactgaccaagaaccaggtgtccctgagctgcgccgtgaagggcttttacccttccgatatcgccgtggaatgggagagcaatggccagcctgagaacaactacaagacaacccctcctgtgctggacagcgacggctcattcttcctggtgtccaagctgacagtggacaagagcagatggcagcagggcaacgtgttcagctgcagcgtgctgcatgaagccctgcacagccactacacccagaagtccctgtctctgagccccggcaagtgataaggatccgatctggtactgcatgcacgcaatgctagctgcccctttcccgtcctgggtaccccgagtctcccccgacctcgggtcccaggtatgctcccacctccacctgccccactcaccacctctgctagttccagacacctcccaagcacgcagcaatgcagctcaaaacgcttagcctagccacacccccacgggaaacagcagtgattaacctttagcaataaacgaaagtttaactaagctatactaaccccagggttggtcaatttcgtgccagccacaccctcgagctagcaaaaaaaaaaaaaaaaaaaaaaaaaaaaaagcatatgactaaaaaaaaaaaaaaaaaaaaaaaaaaaaaaaaaaaaaaaaaaaaaaaaaaaaaaaaaaaaaaaaaaaaaa

SEQ ID NO: 1038 - RNA, 2099 nt, synthetic construct
  source 1..2099: mol_type = other RNA
agaataaactagtattcttctggtccccacagactcagagagaacccgccaccatggattggatctggcgcatcctgtttctcgtgggagctgccacaggcgcccactctcaagttcacctgacacagtctggccccgaagtgcggaagcctggcacaagcgtgaaggtgtcctgtaaagcccctggcaacaccctgaaaacctacgacctgcactgggtccgatctgtgcctggacaaggactgcagtggatgggctggattagccacgagggcgacaagaaagtgatcgtggaacggttcaaggccaaagtgaccatcgactgggacagaagcaccaacaccgcctacctgcagctgagcggactgacatctggcgataccgccgtgtactactgtgccaagggcagcaagcaccggctgagagattacgccctgtacgacgatgacggcgccctgaattgggccgtcgatgtggactacctgagcaacctggaattctggggccagggaacagccgtgacagtgtcttccggtggcggaggaagcggaggcggaggttcaggcggcggaggctctggcggtggtggatctgattttgtgctgacacagagccctcacagcctgagcgttacacctggcgagagcgccagcatcagctgcaagtctagccactctctgatccacggcgaccggaacaactacctggcttggtacgtgcagaagcccggcagatctcctcagctgctgatctacctggccagcagcagagctagcggcgtgccagatagattttctggcagcggcagcgacaaggatttcaccctgaagatctccagagtggaaaccgaggacgtgggcacctactactgtatgcagggcagagagagcccctggacatttggccagggcaccaaggtggacatcaaaggtggcggtggttctggcggaggcggaagtggcggcggtgggtccggaggtggtggatctgaacctaagagcagcgacaagacccacacctgtcctccatgtcctgctccagaactgctggccggaccttccgtgttcctgtttcctccaaagcctaaggacaccctgatgatcagcagaacccctgaagtgacctgcgtggtggtggatgtgtctcacgaggaccccgaagtgaagttcaattggtacgtggacggcgtggaagtgcacaatgccaagaccaagcctagagaggaacagtacaacagcacctacagagtggtgtccgtgctgaccgtgctgcaccaggattggctgaacggcaaagagtacaagtgcaaggtgtccaacaaggccctgcctctgcctgaggaaaagaccatcagcaaggccaagggccagcctcgcgaacctcaagtctgtacactgcctcctagccgcgacgaactgaccaagaaccaggtgtccctgagctgcgccgtgaagggcttttacccttccgatatcgccgtggaatgggagagcaatggccagcctgagaacaactacaagacaacccctcctgtgctggacagcgacggctcattcttcctggtgtccaagctgacagtggacaagagcagatggcagcagggcaacgtgttcagctgcagcgtgctgcatgaagccctgcacagccactacacccagaagtccctgtctctgagccccggcaagtgataaggatccgatctggtactgcatgcacgcaatgctagctgcccctttcccgtcctgggtaccccgagtctcccccgacctcgggtcccaggtatgctcccacctccacctgccccactcaccacctctgctagttccagacacctcccaagcacgcagcaatgcagctcaaaacgcttagcctagccacacccccacgggaaacagcagtgattaacctttagcaataaacgaaagtttaactaagctatactaaccccagggttggtcaatttcgtgccagccacaccctcgagctagcaaaaaaaaaaaaaaaaaaaaaaaaaaaaaagcatatgactaaaaaaaaaaaaaaaaaaaaaaaaaaaaaaaaaaaaaaaaaaaaaaaaaaaaaaaaaaaaaaaaaaaaaa

SEQ ID NO: 1039 - RNA, 2099 nt, synthetic construct
  source 1..2099: mol_type = other RNA
agaataaactagtattcttctggtccccacagactcagagagaacccgccaccatggattggatctggcgcatcctgtttctcgtgggagctgccacaggcgcccactctcaagttcacctgacacagtctggccccgaagtgcggaagcctggcacaagcgtgaaggtgtcctgtaaagcccctggcaacaccctgaaaacctacgacctgcactgggtccgatctgtgcctggacaaggactgcagtggatgggctggattagccacgagggcgacaagaaagtgatcgtggaacggttcaaggccaaagtgaccatcgactgggacagaagcaccaacaccgcctacctgcagctgagcggactgacatctggcgataccgccgtgtactactgtgccaagggcagcaagcaccggctgagagattacgccctgtacgacgatgacggcgccctgaattgggccgtcgatgtggactacctgagcaacctggaattctggggccagggaacagccgtgacagtgtcttccggtggcggaggaagcggaggcggaggttcaggcggcggaggctctggcggtggtggatctgattttgtgctgacacagagccctcacagcctgagcgttacacctggcgagagcgccagcatcagctgcaagtctagccactctctgatccacggcgaccggaacaactacctggcttggtacgtgcagaagcccggcagatctcctcagctgctgatctacctggccagcagcagagctagcggcgtgccagatagattttctggcagcggcagcgacaaggatttcaccctgaagatctccagagtggaaaccgaggacgtgggcacctactactgtatgcagggcagagagagcccctggacatttggccagggcaccaaggtggacatcaaaggtggcggtggttctggcggaggcggaagtggcggcggtgggtccggaggtggtggatctgaacctaagagcagcgacaagacccacacctgtcctccatgtcctgctccagaactgctggccggaccttccgtgttcctgtttcctccaaagcctaaggacaccctgatgatcagcagaacccctgaagtgacctgcgtggtggtggatgtgtctcacgaggaccctgaagtgaagttcaattggtacgtggacggcgtggaagtgcacaacgccaagaccaagcctagagaggaacagtacaacagcacctacagagtggtgtccgtgctgaccgtgctgcaccaggattggctgaacggcaaagagtacaagtgcaaggtgtccaacaaggccctgcctgcccctgaggaaaagaccatcagcaaggccaagggccagcctcgcgaacctcaagtctgtacactgcctcctagccgcgacgaactgaccaagaaccaggtgtccctgagctgcgccgtgaagggcttttacccttccgatatcgccgtggaatgggagagcaatggccagcctgagaacaactacaagacaacccctcctgtgctggacagcgacggctcattcttcctggtgtccaagctgacagtggacaagagcagatggcagcagggcaacgtgttcagctgcagcgtgctgcatgaagccctgcacagccactacacccagaagtccctgtctctgagccccggcaagtgataaggatccgatctggtactgcatgcacgcaatgctagctgcccctttcccgtcctgggtaccccgagtctcccccgacctcgggtcccaggtatgctcccacctccacctgccccactcaccacctctgctagttccagacacctcccaagcacgcagcaatgcagctcaaaacgcttagcctagccacacccccacgggaaacagcagtgattaacctttagcaataaacgaaagtttaactaagctatactaaccccagggttggtcaatttcgtgccagccacaccctcgagctagcaaaaaaaaaaaaaaaaaaaaaaaaaaaaaagcatatgactaaaaaaaaaaaaaaaaaaaaaaaaaaaaaaaaaaaaaaaaaaaaaaaaaaaaaaaaaaaaaaaaaaaaaa

SEQ ID NO: 1040 - RNA, 2099 nt, synthetic construct
  source 1..2099: mol_type = other RNA
agaataaactagtattcttctggtccccacagactcagagagaacccgccaccatggattggatctggcgcatcctgtttctcgtgggagctgccacaggcgcccactctcaagttcacctgacacagtctggccccgaagtgcggaagcctggcacaagcgtgaaggtgtcctgtaaagcccctggcaacaccctgaaaacctacgacctgcactgggtccgatctgtgcctggacaaggactgcagtggatgggctggattagccacgagggcgacaagaaagtgatcgtggaacggttcaaggccaaagtgaccatcgactgggacagaagcaccaacaccgcctacctgcagctgagcggactgacatctggcgataccgccgtgtactactgtgccaagggcagcaagcaccggctgagagattacgccctgtacgacgatgacggcgccctgaattgggccgtcgatgtggactacctgagcaacctggaattctggggccagggaacagccgtgacagtgtcttccggtggcggaggaagcggaggcggaggttcaggcggcggaggctctggcggtggtggatctgattttgtgctgacacagagccctcacagcctgagcgttacacctggcgagagcgccagcatcagctgcaagtctagccactctctgatccacggcgaccggaacaactacctggcttggtacgtgcagaagcccggcagatctcctcagctgctgatctacctggccagcagcagagctagcggcgtgccagatagattttctggcagcggcagcgacaaggatttcaccctgaagatctccagagtggaaaccgaggacgtgggcacctactactgtatgcagggcagagagagcccctggacatttggccagggcaccaaggtggacatcaaaggtggcggtggttctggcggaggcggaagtggcggcggtgggtccggaggtggtggatctgaacctaagagcagcgacaagacccacacctgtcctccatgtcctgctccagaactgctggccggaccttccgtgttcctgtttcctccaaagcctaaggacaccctgatgatcagcagaacccctgaagtgacctgcgtggtggtggatgtgtctcacgaggaccctgaagtgaagttcaattggtacgtggacggcgtggaagtgcacaacgccaagaccaagcctagagaggaacagtacaacagcacctacagagtggtgtccgtgctgaccgtgctgcaccaggattggctgaacggcaaagagtacaagtgcaaggtgtccaacaaggccctgcctgcccctatcgaaaagaccatcagcaaggccaagggccagcctcgcgaacctcaagtctgtacactgcctcctagccgcgacgaactgaccaagaaccaggtgtccctgagctgcgccgtgaagggcttttacccttccgatatcgccgtggaatgggagagcaatggccagcctgagaacaactacaagacaacccctcctgtgctggacagcgacggctcattcttcctggtgtccaagctgacagtggacaagagcagatggcagcagggcaacgtgttcagctgcagcgtgctgcatgaagccctgcacagccactacacccagaagtccctgtctctgagccccggcaagtgataaggatccgatctggtactgcatgcacgcaatgctagctgcccctttcccgtcctgggtaccccgagtctcccccgacctcgggtcccaggtatgctcccacctccacctgccccactcaccacctctgctagttccagacacctcccaagcacgcagcaatgcagctcaaaacgcttagcctagccacacccccacgggaaacagcagtgattaacctttagcaataaacgaaagtttaactaagctatactaaccccagggttggtcaatttcgtgccagccacaccctcgagctagcaaaaaaaaaaaaaaaaaaaaaaaaaaaaaagcatatgactaaaaaaaaaaaaaaaaaaaaaaaaaaaaaaaaaaaaaaaaaaaaaaaaaaaaaaaaaaaaaaaaaaaaaa

SEQ ID NO: 1041 - RNA, 2099 nt, synthetic construct
  source 1..2099: mol_type = other RNA
agaataaactagtattcttctggtccccacagactcagagagaacccgccaccatggattggatctggcgcatcctgtttctcgtgggagctgccacaggcgcccactctcaagttcacctgacacagtctggccccgaagtgcggaagcctggcacaagcgtgaaggtgtcctgtaaagcccctggcaacaccctgaaaacctacgacctgcactgggtccgatctgtgcctggacaaggactgcagtggatgggctggattagccacgagggcgacaagaaagtgatcgtggaacggttcaaggccaaagtgaccatcgactgggacagaagcaccaacaccgcctacctgcagctgagcggactgacatctggcgataccgccgtgtactactgtgccaagggcagcaagcaccggctgagagattacgccctgtacgacgatgacggcgccctgaattgggccgtcgatgtggactacctgagcaacctggaattctggggccagggaacagccgtgacagtgtcttccggtggcggaggaagcggaggcggaggttcaggcggcggaggctctggcggtggtggatctgattttgtgctgacacagagccctcacagcctgagcgttacacctggcgagagcgccagcatcagctgcaagtctagccactctctgatccacggcgaccggaacaactacctggcttggtacgtgcagaagcccggcagatctcctcagctgctgatctacctggccagcagcagagctagcggcgtgccagatagattttctggcagcggcagcgacaaggatttcaccctgaagatctccagagtggaaaccgaggacgtgggcacctactactgtatgcagggcagagagagcccctggacatttggccagggcaccaaggtggacatcaaaggtggcggtggttctggcggaggcggaagtggcggcggtgggtccggaggtggtggatctgaacctaagagcagcgacaagacccacacctgtcctccatgtcctgctccagaactgctgggcggaccttccgtgttcctgtttcctccaaagcctaaggacaccctgatgatcagcagaacccctgaagtgacctgcgtggtggtggatgtgtctcacgaggaccctgaagtgaagttcaattggtacgtggacggcgtggaagtgcacaacgccaagaccaagcctagagaggaacagtacaacagcacctacagagtggtgtccgtgctgaccgtgctgcaccaggattggctgaacggcaaagagtacaagtgcaaggtgtccaacaaggccctgcctgcccctgaggaaaagaccatcagcaaggccaagggccagcctcgcgaacctcaagtctgtacactgcctcctagccgcgacgaactgaccaagaaccaggtgtccctgagctgcgccgtgaagggcttttacccttccgatatcgccgtggaatgggagagcaatggccagcctgagaacaactacaagacaacccctcctgtgctggacagcgacggctcattcttcctggtgtccaagctgacagtggacaagagcagatggcagcagggcaacgtgttcagctgcagcgtgctgcatgaagccctgcacagccactacacccagaagtccctgtctctgagccccggcaagtgataaggatccgatctggtactgcatgcacgcaatgctagctgcccctttcccgtcctgggtaccccgagtctcccccgacctcgggtcccaggtatgctcccacctccacctgccccactcaccacctctgctagttccagacacctcccaagcacgcagcaatgcagctcaaaacgcttagcctagccacacccccacgggaaacagcagtgattaacctttagcaataaacgaaagtttaactaagctatactaaccccagggttggtcaatttcgtgccagccacaccctcgagctagcaaaaaaaaaaaaaaaaaaaaaaaaaaaaaagcatatgactaaaaaaaaaaaaaaaaaaaaaaaaaaaaaaaaaaaaaaaaaaaaaaaaaaaaaaaaaaaaaaaaaaaaaa

SEQ ID NO: 1042 - RNA, 2099 nt, synthetic construct
  source 1..2099: mol_type = other RNA
agaataaactagtattcttctggtccccacagactcagagagaacccgccaccatggattggatctggcgcatcctgtttctcgtgggagctgccacaggcgcccactctcaagttcacctgacacagtctggccccgaagtgcggaagcctggcacaagcgtgaaggtgtcctgtaaagcccctggcaacaccctgaaaacctacgacctgcactgggtccgatctgtgcctggacaaggactgcagtggatgggctggattagccacgagggcgacaagaaagtgatcgtggaacggttcaaggccaaagtgaccatcgactgggacagaagcaccaacaccgcctacctgcagctgagcggactgacatctggcgataccgccgtgtactactgtgccaagggcagcaagcaccggctgagagattacgccctgtacgacgatgacggcgccctgaattgggccgtcgatgtggactacctgagcaacctggaattctggggccagggaacagccgtgacagtgtcttccggtggcggaggaagcggaggcggaggttcaggcggcggaggctctggcggtggtggatctgattttgtgctgacacagagccctcacagcctgagcgttacacctggcgagagcgccagcatcagctgcaagtctagccactctctgatccacggcgaccggaacaactacctggcttggtacgtgcagaagcccggcagatctcctcagctgctgatctacctggccagcagcagagctagcggcgtgccagatagattttctggcagcggcagcgacaaggatttcaccctgaagatctccagagtggaaaccgaggacgtgggcacctactactgtatgcagggcagagagagcccctggacatttggccagggcaccaaggtggacatcaaaggtggcggtggttctggcggaggcggaagtggcggcggtgggtccggaggtggtggatctgaacctaagagcagcgacaagacccacacctgtcctccatgtcctgctccagaactgctcggcggaccttccgtgttcctgtttcctccaaagcctaaggacaccctgatgatcagcagaacccctgaagtgacctgcgtggtggtggatgtgtctcacgaggaccccgaagtgaagttcaattggtacgtggacggcgtggaagtgcacaacgccaagaccaagcctagagaggaacagtacaacagcacctacagagtggtgtccgtgctgacagtgctgcaccaggattggctgaacggcaaagagtacaagtgcaaggtgtccaacaaggccctgcctgctcctatcgagaaaaccatcagcaaggccaagggccagcctagggaaccccaggtttacaccctgcctccatgccgcgacgaactgaccaagaaccaggtgtccctgtggtgcctggtcaagggcttctacccttccgatatcgccgtggaatgggagagcaatggccagcctgagaacaactacaagacaacccctcctgtgctggacagcgacggctcattcttcctgtacagcaagctgacagtggacaagagcagatggcagcagggcaacgtgttcagctgcagcgtgctgcatgaagccctgcacagccactacacccagaagtccctgtctctgagccccggcaagtgataaggatccgatctggtactgcatgcacgcaatgctagctgcccctttcccgtcctgggtaccccgagtctcccccgacctcgggtcccaggtatgctcccacctccacctgccccactcaccacctctgctagttccagacacctcccaagcacgcagcaatgcagctcaaaacgcttagcctagccacacccccacgggaaacagcagtgattaacctttagcaataaacgaaagtttaactaagctatactaaccccagggttggtcaatttcgtgccagccacaccctcgagctagcaaaaaaaaaaaaaaaaaaaaaaaaaaaaaagcatatgactaaaaaaaaaaaaaaaaaaaaaaaaaaaaaaaaaaaaaaaaaaaaaaaaaaaaaaaaaaaaaaaaaaaaaa

SEQ ID NO: 1043 - RNA, 2099 nt, synthetic construct
  source 1..2099: mol_type = other RNA
agaataaactagtattcttctggtccccacagactcagagagaacccgccaccatggattggatctggcgcatcctgtttctcgtgggagctgccacaggcgcccactctcaagttcacctgacacagtctggccccgaagtgcggaagcctggcacaagcgtgaaggtgtcctgtaaagcccctggcaacaccctgaaaacctacgacctgcactgggtccgatctgtgcctggacaaggactgcagtggatgggctggattagccacgagggcgacaagaaagtgatcgtggaacggttcaaggccaaagtgaccatcgactgggacagaagcaccaacaccgcctacctgcagctgagcggactgacatctggcgataccgccgtgtactactgtgccaagggcagcaagcaccggctgagagattacgccctgtacgacgatgacggcgccctgaattgggccgtcgatgtggactacctgagcaacctggaattctggggccagggaacagccgtgacagtgtcttccggtggcggaggaagcggaggcggaggttcaggcggcggaggctctggcggtggtggatctgattttgtgctgacacagagccctcacagcctgagcgttacacctggcgagagcgccagcatcagctgcaagtctagccactctctgatccacggcgaccggaacaactacctggcttggtacgtgcagaagcccggcagatctcctcagctgctgatctacctggccagcagcagagctagcggcgtgccagatagattttctggcagcggcagcgacaaggatttcaccctgaagatctccagagtggaaaccgaggacgtgggcacctactactgtatgcagggcagagagagcccctggacatttggccagggcaccaaggtggacatcaaaggtggcggtggttctggcggaggcggaagtggcggcggtgggtccggaggtggtggatctgaacctaagagcagcgacaagacccacacctgtcctccatgtcctgctccagaactgctggccggaccttccgtgttcctgtttcctccaaagcctaaggacaccctgatgatcagcagaacccctgaagtgacctgcgtggtggtggatgtgtctcacgaggaccccgaagtgaagttcaattggtacgtggacggcgtggaagtgcacaatgccaagaccaagcctagagaggaacagtacaacagcacctacagagtggtgtccgtgctgaccgtgctgcaccaggattggctgaacggcaaagagtacaagtgcaaggtgtccaacaaggccctgcctctgcctgaggaaaagaccatcagcaaggccaagggccagcctagggaaccccaggtttacaccctgcctccatgccgcgacgaactgaccaagaaccaggtgtccctgtggtgcctggtcaagggcttctacccttccgatatcgccgtggaatgggagagcaatggccagcctgagaacaactacaagacaacccctcctgtgctggacagcgacggctcattcttcctgtacagcaagctgacagtggacaagagcagatggcagcagggcaacgtgttcagctgcagcgtgctgcatgaagccctgcacagccactacacccagaagtccctgtctctgagccccggcaagtgataaggatccgatctggtactgcatgcacgcaatgctagctgcccctttcccgtcctgggtaccccgagtctcccccgacctcgggtcccaggtatgctcccacctccacctgccccactcaccacctctgctagttccagacacctcccaagcacgcagcaatgcagctcaaaacgcttagcctagccacacccccacgggaaacagcagtgattaacctttagcaataaacgaaagtttaactaagctatactaaccccagggttggtcaatttcgtgccagccacaccctcgagctagcaaaaaaaaaaaaaaaaaaaaaaaaaaaaaagcatatgactaaaaaaaaaaaaaaaaaaaaaaaaaaaaaaaaaaaaaaaaaaaaaaaaaaaaaaaaaaaaaaaaaaaaaa

SEQ ID NO: 1044 - RNA, 2099 nt, synthetic construct
  source 1..2099: mol_type = other RNA
agaataaactagtattcttctggtccccacagactcagagagaacccgccaccatggattggatctggcgcatcctgtttctcgtgggagctgccacaggcgcccactctcaagttcacctgacacagtctggccccgaagtgcggaagcctggcacaagcgtgaaggtgtcctgtaaagcccctggcaacaccctgaaaacctacgacctgcactgggtccgatctgtgcctggacaaggactgcagtggatgggctggattagccacgagggcgacaagaaagtgatcgtggaacggttcaaggccaaagtgaccatcgactgggacagaagcaccaacaccgcctacctgcagctgagcggactgacatctggcgataccgccgtgtactactgtgccaagggcagcaagcaccggctgagagattacgccctgtacgacgatgacggcgccctgaattgggccgtcgatgtggactacctgagcaacctggaattctggggccagggaacagccgtgacagtgtcttccggtggcggaggaagcggaggcggaggttcaggcggcggaggctctggcggtggtggatctgattttgtgctgacacagagccctcacagcctgagcgttacacctggcgagagcgccagcatcagctgcaagtctagccactctctgatccacggcgaccggaacaactacctggcttggtacgtgcagaagcccggcagatctcctcagctgctgatctacctggccagcagcagagctagcggcgtgccagatagattttctggcagcggcagcgacaaggatttcaccctgaagatctccagagtggaaaccgaggacgtgggcacctactactgtatgcagggcagagagagcccctggacatttggccagggcaccaaggtggacatcaaaggtggcggtggttctggcggaggcggaagtggcggcggtgggtccggaggtggtggatctgaacctaagagcagcgacaagacccacacctgtcctccatgtcctgctccagaactgctggccggaccttccgtgttcctgtttcctccaaagcctaaggacaccctgatgatcagcagaacccctgaagtgacctgcgtggtggtggatgtgtctcacgaggaccctgaagtgaagttcaattggtacgtggacggcgtggaagtgcacaacgccaagaccaagcctagagaggaacagtacaacagcacctacagagtggtgtccgtgctgaccgtgctgcaccaggattggctgaacggcaaagagtacaagtgcaaggtgtccaacaaggccctgcctgcccctgaggaaaagaccatcagcaaggccaagggccagcctagggaaccccaggtttacaccctgcctccatgccgcgacgaactgaccaagaaccaggtgtccctgtggtgcctggtcaagggcttctacccttccgatatcgccgtggaatgggagagcaatggccagcctgagaacaactacaagacaacccctcctgtgctggacagcgacggctcattcttcctgtacagcaagctgacagtggacaagagcagatggcagcagggcaacgtgttcagctgcagcgtgctgcatgaagccctgcacagccactacacccagaagtccctgtctctgagccccggcaagtgataaggatccgatctggtactgcatgcacgcaatgctagctgcccctttcccgtcctgggtaccccgagtctcccccgacctcgggtcccaggtatgctcccacctccacctgccccactcaccacctctgctagttccagacacctcccaagcacgcagcaatgcagctcaaaacgcttagcctagccacacccccacgggaaacagcagtgattaacctttagcaataaacgaaagtttaactaagctatactaaccccagggttggtcaatttcgtgccagccacaccctcgagctagcaaaaaaaaaaaaaaaaaaaaaaaaaaaaaagcatatgactaaaaaaaaaaaaaaaaaaaaaaaaaaaaaaaaaaaaaaaaaaaaaaaaaaaaaaaaaaaaaaaaaaaaaa

SEQ ID NO: 1045 - RNA, 2099 nt, synthetic construct
  source 1..2099: mol_type = other RNA
agaataaactagtattcttctggtccccacagactcagagagaacccgccaccatggattggatctggcgcatcctgtttctcgtgggagctgccacaggcgcccactctcaagttcacctgacacagtctggccccgaagtgcggaagcctggcacaagcgtgaaggtgtcctgtaaagcccctggcaacaccctgaaaacctacgacctgcactgggtccgatctgtgcctggacaaggactgcagtggatgggctggattagccacgagggcgacaagaaagtgatcgtggaacggttcaaggccaaagtgaccatcgactgggacagaagcaccaacaccgcctacctgcagctgagcggactgacatctggcgataccgccgtgtactactgtgccaagggcagcaagcaccggctgagagattacgccctgtacgacgatgacggcgccctgaattgggccgtcgatgtggactacctgagcaacctggaattctggggccagggaacagccgtgacagtgtcttccggtggcggaggaagcggaggcggaggttcaggcggcggaggctctggcggtggtggatctgattttgtgctgacacagagccctcacagcctgagcgttacacctggcgagagcgccagcatcagctgcaagtctagccactctctgatccacggcgaccggaacaactacctggcttggtacgtgcagaagcccggcagatctcctcagctgctgatctacctggccagcagcagagctagcggcgtgccagatagattttctggcagcggcagcgacaaggatttcaccctgaagatctccagagtggaaaccgaggacgtgggcacctactactgtatgcagggcagagagagcccctggacatttggccagggcaccaaggtggacatcaaaggtggcggtggttctggcggaggcggaagtggcggcggtgggtccggaggtggtggatctgaacctaagagcagcgacaagacccacacctgtcctccatgtcctgctccagaactgctggccggaccttccgtgttcctgtttcctccaaagcctaaggacaccctgatgatcagcagaacccctgaagtgacctgcgtggtggtggatgtgtctcacgaggaccctgaagtgaagttcaattggtacgtggacggcgtggaagtgcacaacgccaagaccaagcctagagaggaacagtacaacagcacctacagagtggtgtccgtgctgaccgtgctgcaccaggattggctgaacggcaaagagtacaagtgcaaggtgtccaacaaggccctgcctgcccctatcgaaaagaccatcagcaaggccaagggccagcctagggaaccccaggtttacaccctgcctccatgccgcgacgaactgaccaagaaccaggtgtccctgtggtgcctggtcaagggcttctacccttccgatatcgccgtggaatgggagagcaatggccagcctgagaacaactacaagacaacccctcctgtgctggacagcgacggctcattcttcctgtacagcaagctgacagtggacaagagcagatggcagcagggcaacgtgttcagctgcagcgtgctgcatgaagccctgcacagccactacacccagaagtccctgtctctgagccccggcaagtgataaggatccgatctggtactgcatgcacgcaatgctagctgcccctttcccgtcctgggtaccccgagtctcccccgacctcgggtcccaggtatgctcccacctccacctgccccactcaccacctctgctagttccagacacctcccaagcacgcagcaatgcagctcaaaacgcttagcctagccacacccccacgggaaacagcagtgattaacctttagcaataaacgaaagtttaactaagctatactaaccccagggttggtcaatttcgtgccagccacaccctcgagctagcaaaaaaaaaaaaaaaaaaaaaaaaaaaaaagcatatgactaaaaaaaaaaaaaaaaaaaaaaaaaaaaaaaaaaaaaaaaaaaaaaaaaaaaaaaaaaaaaaaaaaaaaa

SEQ ID NO: 1046 - RNA, 2099 nt, synthetic construct
  source 1..2099: mol_type = other RNA
agaataaactagtattcttctggtccccacagactcagagagaacccgccaccatggattggatctggcgcatcctgtttctcgtgggagctgccacaggcgcccactctcaagttcacctgacacagtctggccccgaagtgcggaagcctggcacaagcgtgaaggtgtcctgtaaagcccctggcaacaccctgaaaacctacgacctgcactgggtccgatctgtgcctggacaaggactgcagtggatgggctggattagccacgagggcgacaagaaagtgatcgtggaacggttcaaggccaaagtgaccatcgactgggacagaagcaccaacaccgcctacctgcagctgagcggactgacatctggcgataccgccgtgtactactgtgccaagggcagcaagcaccggctgagagattacgccctgtacgacgatgacggcgccctgaattgggccgtcgatgtggactacctgagcaacctggaattctggggccagggaacagccgtgacagtgtcttccggtggcggaggaagcggaggcggaggttcaggcggcggaggctctggcggtggtggatctgattttgtgctgacacagagccctcacagcctgagcgttacacctggcgagagcgccagcatcagctgcaagtctagccactctctgatccacggcgaccggaacaactacctggcttggtacgtgcagaagcccggcagatctcctcagctgctgatctacctggccagcagcagagctagcggcgtgccagatagattttctggcagcggcagcgacaaggatttcaccctgaagatctccagagtggaaaccgaggacgtgggcacctactactgtatgcagggcagagagagcccctggacatttggccagggcaccaaggtggacatcaaaggtggcggtggttctggcggaggcggaagtggcggcggtgggtccggaggtggtggatctgaacctaagagcagcgacaagacccacacctgtcctccatgtcctgctccagaactgctgggcggaccttccgtgttcctgtttcctccaaagcctaaggacaccctgatgatcagcagaacccctgaagtgacctgcgtggtggtggatgtgtctcacgaggaccctgaagtgaagttcaattggtacgtggacggcgtggaagtgcacaacgccaagaccaagcctagagaggaacagtacaacagcacctacagagtggtgtccgtgctgaccgtgctgcaccaggattggctgaacggcaaagagtacaagtgcaaggtgtccaacaaggccctgcctgcccctgaggaaaagaccatcagcaaggccaagggccagcctagggaaccccaggtttacaccctgcctccatgccgcgacgaactgaccaagaaccaggtgtccctgtggtgcctggtcaagggcttctacccttccgatatcgccgtggaatgggagagcaatggccagcctgagaacaactacaagacaacccctcctgtgctggacagcgacggctcattcttcctgtacagcaagctgacagtggacaagagcagatggcagcagggcaacgtgttcagctgcagcgtgctgcatgaagccctgcacagccactacacccagaagtccctgtctctgagccccggcaagtgataaggatccgatctggtactgcatgcacgcaatgctagctgcccctttcccgtcctgggtaccccgagtctcccccgacctcgggtcccaggtatgctcccacctccacctgccccactcaccacctctgctagttccagacacctcccaagcacgcagcaatgcagctcaaaacgcttagcctagccacacccccacgggaaacagcagtgattaacctttagcaataaacgaaagtttaactaagctatactaaccccagggttggtcaatttcgtgccagccacaccctcgagctagcaaaaaaaaaaaaaaaaaaaaaaaaaaaaaagcatatgactaaaaaaaaaaaaaaaaaaaaaaaaaaaaaaaaaaaaaaaaaaaaaaaaaaaaaaaaaaaaaaaaaaaaaa

SEQ ID NO: 1047 - RNA, 2099 nt, synthetic construct
  source 1..2099: mol_type = other RNA
agaataaactagtattcttctggtccccacagactcagagagaacccgccaccatggattggatctggcgcatcctgtttctcgtgggagctgccacaggcgcccactctgattttgtgctgacacagtctccccacagcctgagcgttacacctggcgagtctgccagcatcagctgcaagtctagccactctctgatccacggcgaccggaacaactacctggcttggtacgtgcagaagcccggcagatctcctcagctgctgatctacctggccagcagcagagcttctggcgtgcccgatagattttctggcagcggcagcgacaaggacttcaccctgaagatctccagagtggaaaccgaggacgtgggcacctactactgtatgcagggcagagagagcccctggacatttggccagggcaccaaggtggacatcaaaggcggcggaggaagcggaggcggaggttctggtggcggaggctcaggcggtggcggatctcaagttcatctgacacagagcggccctgaagtgcggaagcctggcacaagcgtgaaggtgtcctgtaaagcccctggcaacaccctgaaaacctacgacctgcactgggtccgatctgtgcctggacagggactgcaatggatgggctggattagccacgagggcgacaagaaagtgatcgtggaacggttcaaggccaaagtgaccatcgactgggacagaagcaccaacaccgcctacctgcagctgagcggactgacatctggcgataccgccgtgtactactgtgccaagggcagcaagcaccggctgagagattacgccctgtacgacgatgacggcgccctgaattgggccgtcgatgtggactacctgagcaacctggaattctggggccagggaacagccgtgacagtgtcttccggcggaggtggaagtggtggtggcggtagcggaggcggtgggtccggaggtggtggatctgaacctaagagcagcgacaagacccacacctgtcctccatgtcctgctccagaactgctcggcggaccttccgtgttcctgtttcctccaaagcctaaggacaccctgatgatcagcagaacccctgaagtgacctgcgtggtggtggatgtgtctcacgaggaccccgaagtgaagttcaattggtacgtggacggcgtggaagtgcacaacgccaagaccaagcctagagaggaacagtacaacagcacctacagagtggtgtccgtgctgacagtgctgcaccaggattggctgaacggcaaagagtacaagtgcaaggtgtccaacaaggccctgcctgctcctatcgagaaaaccatcagcaaggccaagggccagcctagggaaccccaggtttacacactgcctccaagccgcgaggaaatgaccaagaaccaggtgtccctgacctgcctcgtgaagggcttctacccttccgatatcgccgtggaatgggagagcaatggccagcctgagaacaactacaagacaacccctcctgtgctggacagcgacggctcattcttcctgtacagcaagctgactgtggataagtcccggtggcagcagggcaacgtgttcagctgttctgtgatgcacgaagccctgcacaaccactacacccagaaaagcctgtctctgagccccggcaagtgataaggatccgatctggtactgcatgcacgcaatgctagctgcccctttcccgtcctgggtaccccgagtctcccccgacctcgggtcccaggtatgctcccacctccacctgccccactcaccacctctgctagttccagacacctcccaagcacgcagcaatgcagctcaaaacgcttagcctagccacacccccacgggaaacagcagtgattaacctttagcaataaacgaaagtttaactaagctatactaaccccagggttggtcaatttcgtgccagccacaccctcgagctagcaaaaaaaaaaaaaaaaaaaaaaaaaaaaaagcatatgactaaaaaaaaaaaaaaaaaaaaaaaaaaaaaaaaaaaaaaaaaaaaaaaaaaaaaaaaaaaaaaaaaaaaaa

SEQ ID NO: 1048 - RNA, 2099 nt, synthetic construct
  source 1..2099: mol_type = other RNA
agaataaactagtattcttctggtccccacagactcagagagaacccgccaccatggattggatctggcgcatcctgtttctcgtgggagctgccacaggcgcccactctgattttgtgctgacacagtctccccacagcctgagcgttacacctggcgagtctgccagcatcagctgcaagtctagccactctctgatccacggcgaccggaacaactacctggcttggtacgtgcagaagcccggcagatctcctcagctgctgatctacctggccagcagcagagcttctggcgtgcccgatagattttctggcagcggcagcgacaaggacttcaccctgaagatctccagagtggaaaccgaggacgtgggcacctactactgtatgcagggcagagagagcccctggacatttggccagggcaccaaggtggacatcaaaggcggcggaggaagcggaggcggaggttctggtggcggaggctcaggcggtggcggatctcaagttcatctgacacagagcggccctgaagtgcggaagcctggcacaagcgtgaaggtgtcctgtaaagcccctggcaacaccctgaaaacctacgacctgcactgggtccgatctgtgcctggacagggactgcaatggatgggctggattagccacgagggcgacaagaaagtgatcgtggaacggttcaaggccaaagtgaccatcgactgggacagaagcaccaacaccgcctacctgcagctgagcggactgacatctggcgataccgccgtgtactactgtgccaagggcagcaagcaccggctgagagattacgccctgtacgacgatgacggcgccctgaattgggccgtcgatgtggactacctgagcaacctggaattctggggccagggaacagccgtgacagtgtcttccggcggaggtggaagtggtggtggcggtagcggaggcggtgggtccggaggtggtggatctgaacctaagagcagcgacaagacccacacctgtcctccatgtcctgctccagaactgctcggcggaccttccgtgttcctgtttcctccaaagcctaaggacaccctgatgatcagcagaacccctgaagtgacctgcgtggtggtggatgtgtctcacgaggaccccgaagtgaagttcaattggtacgtggacggcgtggaagtgcacaacgccaagaccaagcctagagaggaacagtacaacagcacctacagagtggtgtccgtgctgacagtgctgcaccaggattggctgaacggcaaagagtacaagtgcaaggtgtccaacaaggccctgcctgctcctatcgagaaaaccatcagcaaggccaagggccagcctagggaaccccaggtttacacactgcctccaagccgcgaggaaatgaccaagaaccaggtgtccctgacctgcctcgtgaagggcttctacccttccgatatcgccgtggaatgggagagcaatggccagcctgagaacaactacaagacaacccctcctgtgctggacagcgacggctcattcttcctgtacagcaagctgaccgtggacaagtccagatggcagcagggcaacgtgttcagctgtagcgtgctgcacgaagccctgcacagccactacacccagaaaagcctgtctctgagccccggcaaatgataaggatccgatctggtactgcatgcacgcaatgctagctgcccctttcccgtcctgggtaccccgagtctcccccgacctcgggtcccaggtatgctcccacctccacctgccccactcaccacctctgctagttccagacacctcccaagcacgcagcaatgcagctcaaaacgcttagcctagccacacccccacgggaaacagcagtgattaacctttagcaataaacgaaagtttaactaagctatactaaccccagggttggtcaatttcgtgccagccacaccctcgagctagcaaaaaaaaaaaaaaaaaaaaaaaaaaaaaagcatatgactaaaaaaaaaaaaaaaaaaaaaaaaaaaaaaaaaaaaaaaaaaaaaaaaaaaaaaaaaaaaaaaaaaaaaa

SEQ ID NO: 1049 - RNA, 2099 nt, synthetic construct
  source 1..2099: mol_type = other RNA
agaataaactagtattcttctggtccccacagactcagagagaacccgccaccatggattggatctggcgcatcctgtttctcgtgggagctgccacaggcgcccactctgattttgtgctgacacagtctccccacagcctgagcgttacacctggcgagtctgccagcatcagctgcaagtctagccactctctgatccacggcgaccggaacaactacctggcttggtacgtgcagaagcccggcagatctcctcagctgctgatctacctggccagcagcagagcttctggcgtgcccgatagattttctggcagcggcagcgacaaggacttcaccctgaagatctccagagtggaaaccgaggacgtgggcacctactactgtatgcagggcagagagagcccctggacatttggccagggcaccaaggtggacatcaaaggcggcggaggaagcggaggcggaggttctggtggcggaggctcaggcggtggcggatctcaagttcatctgacacagagcggccctgaagtgcggaagcctggcacaagcgtgaaggtgtcctgtaaagcccctggcaacaccctgaaaacctacgacctgcactgggtccgatctgtgcctggacagggactgcaatggatgggctggattagccacgagggcgacaagaaagtgatcgtggaacggttcaaggccaaagtgaccatcgactgggacagaagcaccaacaccgcctacctgcagctgagcggactgacatctggcgataccgccgtgtactactgtgccaagggcagcaagcaccggctgagagattacgccctgtacgacgatgacggcgccctgaattgggccgtcgatgtggactacctgagcaacctggaattctggggccagggaacagccgtgacagtgtcttccggcggaggtggaagtggtggtggcggtagcggaggcggtgggtccggaggtggtggatctgaacctaagagcagcgacaagacccacacctgtcctccatgtcctgctccagaactgctggccggaccttccgtgttcctgtttcctccaaagcctaaggacaccctgatgatcagcagaacccctgaagtgacctgcgtggtggtggatgtgtctcacgaggaccccgaagtgaagttcaattggtacgtggacggcgtggaagtgcacaatgccaagaccaagcctagagaggaacagtacaacagcacctacagagtggtgtccgtgctgaccgtgctgcaccaggattggctgaacggcaaagagtacaagtgcaaggtgtccaacaaggccctgcctctgcctgaggaaaagaccatcagcaaggccaagggccagcctagggaaccccaggtttacacactgcctccaagccgcgaggaaatgaccaagaaccaggtgtccctgacctgcctcgtgaagggcttctacccttccgatatcgccgtggaatgggagagcaatggccagcctgagaacaactacaagacaacccctcctgtgctggacagcgacggctcattcttcctgtacagcaagctgaccgtggacaagtccagatggcagcagggcaacgtgttcagctgtagcgtgctgcacgaagccctgcacagccactacacccagaaaagcctgtctctgagccccggcaaatgataaggatccgatctggtactgcatgcacgcaatgctagctgcccctttcccgtcctgggtaccccgagtctcccccgacctcgggtcccaggtatgctcccacctccacctgccccactcaccacctctgctagttccagacacctcccaagcacgcagcaatgcagctcaaaacgcttagcctagccacacccccacgggaaacagcagtgattaacctttagcaataaacgaaagtttaactaagctatactaaccccagggttggtcaatttcgtgccagccacaccctcgagctagcaaaaaaaaaaaaaaaaaaaaaaaaaaaaaagcatatgactaaaaaaaaaaaaaaaaaaaaaaaaaaaaaaaaaaaaaaaaaaaaaaaaaaaaaaaaaaaaaaaaaaaaaa

SEQ ID NO: 1050 - RNA, 2099 nt, synthetic construct
  source 1..2099: mol_type = other RNA
agaataaactagtattcttctggtccccacagactcagagagaacccgccaccatggattggatctggcgcatcctgtttctcgtgggagctgccacaggcgcccactctgattttgtgctgacacagtctccccacagcctgagcgttacacctggcgagtctgccagcatcagctgcaagtctagccactctctgatccacggcgaccggaacaactacctggcttggtacgtgcagaagcccggcagatctcctcagctgctgatctacctggccagcagcagagcttctggcgtgcccgatagattttctggcagcggcagcgacaaggacttcaccctgaagatctccagagtggaaaccgaggacgtgggcacctactactgtatgcagggcagagagagcccctggacatttggccagggcaccaaggtggacatcaaaggcggcggaggaagcggaggcggaggttctggtggcggaggctcaggcggtggcggatctcaagttcatctgacacagagcggccctgaagtgcggaagcctggcacaagcgtgaaggtgtcctgtaaagcccctggcaacaccctgaaaacctacgacctgcactgggtccgatctgtgcctggacagggactgcaatggatgggctggattagccacgagggcgacaagaaagtgatcgtggaacggttcaaggccaaagtgaccatcgactgggacagaagcaccaacaccgcctacctgcagctgagcggactgacatctggcgataccgccgtgtactactgtgccaagggcagcaagcaccggctgagagattacgccctgtacgacgatgacggcgccctgaattgggccgtcgatgtggactacctgagcaacctggaattctggggccagggaacagccgtgacagtgtcttccggcggaggtggaagtggtggtggcggtagcggaggcggtgggtccggaggtggtggatctgaacctaagagcagcgacaagacccacacctgtcctccatgtcctgctccagaactgctggccggaccttccgtgttcctgtttcctccaaagcctaaggacaccctgatgatcagcagaacccctgaagtgacctgcgtggtggtggatgtgtctcacgaggaccctgaagtgaagttcaattggtacgtggacggcgtggaagtgcacaacgccaagaccaagcctagagaggaacagtacaacagcacctacagagtggtgtccgtgctgaccgtgctgcaccaggattggctgaacggcaaagagtacaagtgcaaggtgtccaacaaggccctgcctgcccctgaggaaaagaccatcagcaaggccaagggccagcctagggaaccccaggtttacacactgcctccaagccgcgaggaaatgaccaagaaccaggtgtccctgacctgcctcgtgaagggcttctacccttccgatatcgccgtggaatgggagagcaatggccagcctgagaacaactacaagacaacccctcctgtgctggacagcgacggctcattcttcctgtacagcaagctgaccgtggacaagtccagatggcagcagggcaacgtgttcagctgtagcgtgctgcacgaagccctgcacagccactacacccagaaaagcctgtctctgagccccggcaaatgataaggatccgatctggtactgcatgcacgcaatgctagctgcccctttcccgtcctgggtaccccgagtctcccccgacctcgggtcccaggtatgctcccacctccacctgccccactcaccacctctgctagttccagacacctcccaagcacgcagcaatgcagctcaaaacgcttagcctagccacacccccacgggaaacagcagtgattaacctttagcaataaacgaaagtttaactaagctatactaaccccagggttggtcaatttcgtgccagccacaccctcgagctagcaaaaaaaaaaaaaaaaaaaaaaaaaaaaaagcatatgactaaaaaaaaaaaaaaaaaaaaaaaaaaaaaaaaaaaaaaaaaaaaaaaaaaaaaaaaaaaaaaaaaaaaaa

SEQ ID NO: 1051 - RNA, 2099 nt, synthetic construct
  source 1..2099: mol_type = other RNA
agaataaactagtattcttctggtccccacagactcagagagaacccgccaccatggattggatctggcgcatcctgtttctcgtgggagctgccacaggcgcccactctgattttgtgctgacacagtctccccacagcctgagcgttacacctggcgagtctgccagcatcagctgcaagtctagccactctctgatccacggcgaccggaacaactacctggcttggtacgtgcagaagcccggcagatctcctcagctgctgatctacctggccagcagcagagcttctggcgtgcccgatagattttctggcagcggcagcgacaaggacttcaccctgaagatctccagagtggaaaccgaggacgtgggcacctactactgtatgcagggcagagagagcccctggacatttggccagggcaccaaggtggacatcaaaggcggcggaggaagcggaggcggaggttctggtggcggaggctcaggcggtggcggatctcaagttcatctgacacagagcggccctgaagtgcggaagcctggcacaagcgtgaaggtgtcctgtaaagcccctggcaacaccctgaaaacctacgacctgcactgggtccgatctgtgcctggacagggactgcaatggatgggctggattagccacgagggcgacaagaaagtgatcgtggaacggttcaaggccaaagtgaccatcgactgggacagaagcaccaacaccgcctacctgcagctgagcggactgacatctggcgataccgccgtgtactactgtgccaagggcagcaagcaccggctgagagattacgccctgtacgacgatgacggcgccctgaattgggccgtcgatgtggactacctgagcaacctggaattctggggccagggaacagccgtgacagtgtcttccggcggaggtggaagtggtggtggcggtagcggaggcggtgggtccggaggtggtggatctgaacctaagagcagcgacaagacccacacctgtcctccatgtcctgctccagaactgctggccggaccttccgtgttcctgtttcctccaaagcctaaggacaccctgatgatcagcagaacccctgaagtgacctgcgtggtggtggatgtgtctcacgaggaccctgaagtgaagttcaattggtacgtggacggcgtggaagtgcacaacgccaagaccaagcctagagaggaacagtacaacagcacctacagagtggtgtccgtgctgaccgtgctgcaccaggattggctgaacggcaaagagtacaagtgcaaggtgtccaacaaggccctgcctgcccctatcgaaaagaccatcagcaaggccaagggccagcctagggaaccccaggtttacacactgcctccaagccgcgaggaaatgaccaagaaccaggtgtccctgacctgcctcgtgaagggcttctacccttccgatatcgccgtggaatgggagagcaatggccagcctgagaacaactacaagacaacccctcctgtgctggacagcgacggctcattcttcctgtacagcaagctgaccgtggacaagtccagatggcagcagggcaacgtgttcagctgtagcgtgctgcacgaagccctgcacagccactacacccagaaaagcctgtctctgagccccggcaaatgataaggatccgatctggtactgcatgcacgcaatgctagctgcccctttcccgtcctgggtaccccgagtctcccccgacctcgggtcccaggtatgctcccacctccacctgccccactcaccacctctgctagttccagacacctcccaagcacgcagcaatgcagctcaaaacgcttagcctagccacacccccacgggaaacagcagtgattaacctttagcaataaacgaaagtttaactaagctatactaaccccagggttggtcaatttcgtgccagccacaccctcgagctagcaaaaaaaaaaaaaaaaaaaaaaaaaaaaaagcatatgactaaaaaaaaaaaaaaaaaaaaaaaaaaaaaaaaaaaaaaaaaaaaaaaaaaaaaaaaaaaaaaaaaaaaaa

SEQ ID NO: 1052 - RNA, 2099 nt, synthetic construct
  source 1..2099: mol_type = other RNA
agaataaactagtattcttctggtccccacagactcagagagaacccgccaccatggattggatctggcgcatcctgtttctcgtgggagctgccacaggcgcccactctgattttgtgctgacacagtctccccacagcctgagcgttacacctggcgagtctgccagcatcagctgcaagtctagccactctctgatccacggcgaccggaacaactacctggcttggtacgtgcagaagcccggcagatctcctcagctgctgatctacctggccagcagcagagcttctggcgtgcccgatagattttctggcagcggcagcgacaaggacttcaccctgaagatctccagagtggaaaccgaggacgtgggcacctactactgtatgcagggcagagagagcccctggacatttggccagggcaccaaggtggacatcaaaggcggcggaggaagcggaggcggaggttctggtggcggaggctcaggcggtggcggatctcaagttcatctgacacagagcggccctgaagtgcggaagcctggcacaagcgtgaaggtgtcctgtaaagcccctggcaacaccctgaaaacctacgacctgcactgggtccgatctgtgcctggacagggactgcaatggatgggctggattagccacgagggcgacaagaaagtgatcgtggaacggttcaaggccaaagtgaccatcgactgggacagaagcaccaacaccgcctacctgcagctgagcggactgacatctggcgataccgccgtgtactactgtgccaagggcagcaagcaccggctgagagattacgccctgtacgacgatgacggcgccctgaattgggccgtcgatgtggactacctgagcaacctggaattctggggccagggaacagccgtgacagtgtcttccggcggaggtggaagtggtggtggcggtagcggaggcggtgggtccggaggtggtggatctgaacctaagagcagcgacaagacccacacctgtcctccatgtcctgctccagaactgctgggcggaccttccgtgttcctgtttcctccaaagcctaaggacaccctgatgatcagcagaacccctgaagtgacctgcgtggtggtggatgtgtctcacgaggaccctgaagtgaagttcaattggtacgtggacggcgtggaagtgcacaacgccaagaccaagcctagagaggaacagtacaacagcacctacagagtggtgtccgtgctgaccgtgctgcaccaggattggctgaacggcaaagagtacaagtgcaaggtgtccaacaaggccctgcctgcccctgaggaaaagaccatcagcaaggccaagggccagcctagggaaccccaggtttacacactgcctccaagccgcgaggaaatgaccaagaaccaggtgtccctgacctgcctcgtgaagggcttctacccttccgatatcgccgtggaatgggagagcaatggccagcctgagaacaactacaagacaacccctcctgtgctggacagcgacggctcattcttcctgtacagcaagctgaccgtggacaagtccagatggcagcagggcaacgtgttcagctgtagcgtgctgcacgaagccctgcacagccactacacccagaaaagcctgtctctgagccccggcaaatgataaggatccgatctggtactgcatgcacgcaatgctagctgcccctttcccgtcctgggtaccccgagtctcccccgacctcgggtcccaggtatgctcccacctccacctgccccactcaccacctctgctagttccagacacctcccaagcacgcagcaatgcagctcaaaacgcttagcctagccacacccccacgggaaacagcagtgattaacctttagcaataaacgaaagtttaactaagctatactaaccccagggttggtcaatttcgtgccagccacaccctcgagctagcaaaaaaaaaaaaaaaaaaaaaaaaaaaaaagcatatgactaaaaaaaaaaaaaaaaaaaaaaaaaaaaaaaaaaaaaaaaaaaaaaaaaaaaaaaaaaaaaaaaaaaaaa

SEQ ID NO: 1053 - RNA, 2099 nt, synthetic construct
  source 1..2099: mol_type = other RNA
agaataaactagtattcttctggtccccacagactcagagagaacccgccaccatggattggatctggcgcatcctgtttctcgtgggagctgccacaggcgcccactctgattttgtgctgacacagtctccccacagcctgagcgttacacctggcgagtctgccagcatcagctgcaagtctagccactctctgatccacggcgaccggaacaactacctggcttggtacgtgcagaagcccggcagatctcctcagctgctgatctacctggccagcagcagagcttctggcgtgcccgatagattttctggcagcggcagcgacaaggacttcaccctgaagatctccagagtggaaaccgaggacgtgggcacctactactgtatgcagggcagagagagcccctggacatttggccagggcaccaaggtggacatcaaaggcggcggaggaagcggaggcggaggttctggtggcggaggctcaggcggtggcggatctcaagttcatctgacacagagcggccctgaagtgcggaagcctggcacaagcgtgaaggtgtcctgtaaagcccctggcaacaccctgaaaacctacgacctgcactgggtccgatctgtgcctggacagggactgcaatggatgggctggattagccacgagggcgacaagaaagtgatcgtggaacggttcaaggccaaagtgaccatcgactgggacagaagcaccaacaccgcctacctgcagctgagcggactgacatctggcgataccgccgtgtactactgtgccaagggcagcaagcaccggctgagagattacgccctgtacgacgatgacggcgccctgaattgggccgtcgatgtggactacctgagcaacctggaattctggggccagggaacagccgtgacagtgtcttccggcggaggtggaagtggtggtggcggtagcggaggcggtgggtccggaggtggtggatctgaacctaagagcagcgacaagacccacacctgtcctccatgtcctgctccagaactgctcggcggaccttccgtgttcctgtttcctccaaagcctaaggacaccctgatgatcagcagaacccctgaagtgacctgcgtggtggtggatgtgtctcacgaggaccccgaagtgaagttcaattggtacgtggacggcgtggaagtgcacaacgccaagaccaagcctagagaggaacagtacaacagcacctacagagtggtgtccgtgctgacagtgctgcaccaggattggctgaacggcaaagagtacaagtgcaaggtgtccaacaaggccctgcctgctcctatcgagaaaaccatcagcaaggccaagggccagcctagggaaccccaagtctgtacactgcctcctagccgcgaggaaatgaccaagaaccaggtgtccctgagctgcgccgtgaagggcttttacccttccgatatcgccgtggaatgggagagcaatggccagcctgagaacaactacaagacaacccctcctgtgctggacagcgacggctcattcttcctggtgtccaagctgacagtggacaagagcagatggcagcagggcaacgtgttcagctgctctgtgctgcacgaagccctgcacagccactacacccagaagtccctgtctctgagccccggcaagtgataaggatccgatctggtactgcatgcacgcaatgctagctgcccctttcccgtcctgggtaccccgagtctcccccgacctcgggtcccaggtatgctcccacctccacctgccccactcaccacctctgctagttccagacacctcccaagcacgcagcaatgcagctcaaaacgcttagcctagccacacccccacgggaaacagcagtgattaacctttagcaataaacgaaagtttaactaagctatactaaccccagggttggtcaatttcgtgccagccacaccctcgagctagcaaaaaaaaaaaaaaaaaaaaaaaaaaaaaagcatatgactaaaaaaaaaaaaaaaaaaaaaaaaaaaaaaaaaaaaaaaaaaaaaaaaaaaaaaaaaaaaaaaaaaaaaa

SEQ ID NO: 1054 - RNA, 2099 nt, synthetic construct
  source 1..2099: mol_type = other RNA
agaataaactagtattcttctggtccccacagactcagagagaacccgccaccatggattggatctggcgcatcctgtttctcgtgggagctgccacaggcgcccactctgattttgtgctgacacagtctccccacagcctgagcgttacacctggcgagtctgccagcatcagctgcaagtctagccactctctgatccacggcgaccggaacaactacctggcttggtacgtgcagaagcccggcagatctcctcagctgctgatctacctggccagcagcagagcttctggcgtgcccgatagattttctggcagcggcagcgacaaggacttcaccctgaagatctccagagtggaaaccgaggacgtgggcacctactactgtatgcagggcagagagagcccctggacatttggccagggcaccaaggtggacatcaaaggcggcggaggaagcggaggcggaggttctggtggcggaggctcaggcggtggcggatctcaagttcatctgacacagagcggccctgaagtgcggaagcctggcacaagcgtgaaggtgtcctgtaaagcccctggcaacaccctgaaaacctacgacctgcactgggtccgatctgtgcctggacagggactgcaatggatgggctggattagccacgagggcgacaagaaagtgatcgtggaacggttcaaggccaaagtgaccatcgactgggacagaagcaccaacaccgcctacctgcagctgagcggactgacatctggcgataccgccgtgtactactgtgccaagggcagcaagcaccggctgagagattacgccctgtacgacgatgacggcgccctgaattgggccgtcgatgtggactacctgagcaacctggaattctggggccagggaacagccgtgacagtgtcttccggcggaggtggaagtggtggtggcggtagcggaggcggtgggtccggaggtggtggatctgaacctaagagcagcgacaagacccacacctgtcctccatgtcctgctccagaactgctggccggaccttccgtgttcctgtttcctccaaagcctaaggacaccctgatgatcagcagaacccctgaagtgacctgcgtggtggtggatgtgtctcacgaggaccccgaagtgaagttcaattggtacgtggacggcgtggaagtgcacaatgccaagaccaagcctagagaggaacagtacaacagcacctacagagtggtgtccgtgctgaccgtgctgcaccaggattggctgaacggcaaagagtacaagtgcaaggtgtccaacaaggccctgcctctgcctgaggaaaagaccatcagcaaggccaagggccagcctagggaaccccaagtctgtacactgcctcctagccgcgaggaaatgaccaagaaccaggtgtccctgagctgcgccgtgaagggcttttacccttccgatatcgccgtggaatgggagagcaatggccagcctgagaacaactacaagacaacccctcctgtgctggacagcgacggctcattcttcctggtgtccaagctgacagtggacaagagcagatggcagcagggcaacgtgttcagctgctctgtgctgcacgaagccctgcacagccactacacccagaagtccctgtctctgagccccggcaagtgataaggatccgatctggtactgcatgcacgcaatgctagctgcccctttcccgtcctgggtaccccgagtctcccccgacctcgggtcccaggtatgctcccacctccacctgccccactcaccacctctgctagttccagacacctcccaagcacgcagcaatgcagctcaaaacgcttagcctagccacacccccacgggaaacagcagtgattaacctttagcaataaacgaaagtttaactaagctatactaaccccagggttggtcaatttcgtgccagccacaccctcgagctagcaaaaaaaaaaaaaaaaaaaaaaaaaaaaaagcatatgactaaaaaaaaaaaaaaaaaaaaaaaaaaaaaaaaaaaaaaaaaaaaaaaaaaaaaaaaaaaaaaaaaaaaaa

SEQ ID NO: 1055 - RNA, 2099 nt, synthetic construct
  source 1..2099: mol_type = other RNA
agaataaactagtattcttctggtccccacagactcagagagaacccgccaccatggattggatctggcgcatcctgtttctcgtgggagctgccacaggcgcccactctgattttgtgctgacacagtctccccacagcctgagcgttacacctggcgagtctgccagcatcagctgcaagtctagccactctctgatccacggcgaccggaacaactacctggcttggtacgtgcagaagcccggcagatctcctcagctgctgatctacctggccagcagcagagcttctggcgtgcccgatagattttctggcagcggcagcgacaaggacttcaccctgaagatctccagagtggaaaccgaggacgtgggcacctactactgtatgcagggcagagagagcccctggacatttggccagggcaccaaggtggacatcaaaggcggcggaggaagcggaggcggaggttctggtggcggaggctcaggcggtggcggatctcaagttcatctgacacagagcggccctgaagtgcggaagcctggcacaagcgtgaaggtgtcctgtaaagcccctggcaacaccctgaaaacctacgacctgcactgggtccgatctgtgcctggacagggactgcaatggatgggctggattagccacgagggcgacaagaaagtgatcgtggaacggttcaaggccaaagtgaccatcgactgggacagaagcaccaacaccgcctacctgcagctgagcggactgacatctggcgataccgccgtgtactactgtgccaagggcagcaagcaccggctgagagattacgccctgtacgacgatgacggcgccctgaattgggccgtcgatgtggactacctgagcaacctggaattctggggccagggaacagccgtgacagtgtcttccggcggaggtggaagtggtggtggcggtagcggaggcggtgggtccggaggtggtggatctgaacctaagagcagcgacaagacccacacctgtcctccatgtcctgctccagaactgctggccggaccttccgtgttcctgtttcctccaaagcctaaggacaccctgatgatcagcagaacccctgaagtgacctgcgtggtggtggatgtgtctcacgaggaccctgaagtgaagttcaattggtacgtggacggcgtggaagtgcacaacgccaagaccaagcctagagaggaacagtacaacagcacctacagagtggtgtccgtgctgaccgtgctgcaccaggattggctgaacggcaaagagtacaagtgcaaggtgtccaacaaggccctgcctgcccctgaggaaaagaccatcagcaaggccaagggccagcctagggaaccccaagtctgtacactgcctcctagccgcgaggaaatgaccaagaaccaggtgtccctgagctgcgccgtgaagggcttttacccttccgatatcgccgtggaatgggagagcaatggccagcctgagaacaactacaagacaacccctcctgtgctggacagcgacggctcattcttcctggtgtccaagctgacagtggacaagagcagatggcagcagggcaacgtgttcagctgctctgtgctgcacgaagccctgcacagccactacacccagaagtccctgtctctgagccccggcaagtgataaggatccgatctggtactgcatgcacgcaatgctagctgcccctttcccgtcctgggtaccccgagtctcccccgacctcgggtcccaggtatgctcccacctccacctgccccactcaccacctctgctagttccagacacctcccaagcacgcagcaatgcagctcaaaacgcttagcctagccacacccccacgggaaacagcagtgattaacctttagcaataaacgaaagtttaactaagctatactaaccccagggttggtcaatttcgtgccagccacaccctcgagctagcaaaaaaaaaaaaaaaaaaaaaaaaaaaaaagcatatgactaaaaaaaaaaaaaaaaaaaaaaaaaaaaaaaaaaaaaaaaaaaaaaaaaaaaaaaaaaaaaaaaaaaaaa

SEQ ID NO: 1056 - RNA, 2099 nt, synthetic construct
  source 1..2099: mol_type = other RNA
agaataaactagtattcttctggtccccacagactcagagagaacccgccaccatggattggatctggcgcatcctgtttctcgtgggagctgccacaggcgcccactctgattttgtgctgacacagtctccccacagcctgagcgttacacctggcgagtctgccagcatcagctgcaagtctagccactctctgatccacggcgaccggaacaactacctggcttggtacgtgcagaagcccggcagatctcctcagctgctgatctacctggccagcagcagagcttctggcgtgcccgatagattttctggcagcggcagcgacaaggacttcaccctgaagatctccagagtggaaaccgaggacgtgggcacctactactgtatgcagggcagagagagcccctggacatttggccagggcaccaaggtggacatcaaaggcggcggaggaagcggaggcggaggttctggtggcggaggctcaggcggtggcggatctcaagttcatctgacacagagcggccctgaagtgcggaagcctggcacaagcgtgaaggtgtcctgtaaagcccctggcaacaccctgaaaacctacgacctgcactgggtccgatctgtgcctggacagggactgcaatggatgggctggattagccacgagggcgacaagaaagtgatcgtggaacggttcaaggccaaagtgaccatcgactgggacagaagcaccaacaccgcctacctgcagctgagcggactgacatctggcgataccgccgtgtactactgtgccaagggcagcaagcaccggctgagagattacgccctgtacgacgatgacggcgccctgaattgggccgtcgatgtggactacctgagcaacctggaattctggggccagggaacagccgtgacagtgtcttccggcggaggtggaagtggtggtggcggtagcggaggcggtgggtccggaggtggtggatctgaacctaagagcagcgacaagacccacacctgtcctccatgtcctgctccagaactgctggccggaccttccgtgttcctgtttcctccaaagcctaaggacaccctgatgatcagcagaacccctgaagtgacctgcgtggtggtggatgtgtctcacgaggaccctgaagtgaagttcaattggtacgtggacggcgtggaagtgcacaacgccaagaccaagcctagagaggaacagtacaacagcacctacagagtggtgtccgtgctgaccgtgctgcaccaggattggctgaacggcaaagagtacaagtgcaaggtgtccaacaaggccctgcctgcccctatcgaaaagaccatcagcaaggccaagggccagcctagggaaccccaagtctgtacactgcctcctagccgcgaggaaatgaccaagaaccaggtgtccctgagctgcgccgtgaagggcttttacccttccgatatcgccgtggaatgggagagcaatggccagcctgagaacaactacaagacaacccctcctgtgctggacagcgacggctcattcttcctggtgtccaagctgacagtggacaagagcagatggcagcagggcaacgtgttcagctgctctgtgctgcacgaagccctgcacagccactacacccagaagtccctgtctctgagccccggcaagtgataaggatccgatctggtactgcatgcacgcaatgctagctgcccctttcccgtcctgggtaccccgagtctcccccgacctcgggtcccaggtatgctcccacctccacctgccccactcaccacctctgctagttccagacacctcccaagcacgcagcaatgcagctcaaaacgcttagcctagccacacccccacgggaaacagcagtgattaacctttagcaataaacgaaagtttaactaagctatactaaccccagggttggtcaatttcgtgccagccacaccctcgagctagcaaaaaaaaaaaaaaaaaaaaaaaaaaaaaagcatatgactaaaaaaaaaaaaaaaaaaaaaaaaaaaaaaaaaaaaaaaaaaaaaaaaaaaaaaaaaaaaaaaaaaaaaa

SEQ ID NO: 1057 - RNA, 2099 nt, synthetic construct
  source 1..2099: mol_type = other RNA
agaataaactagtattcttctggtccccacagactcagagagaacccgccaccatggattggatctggcgcatcctgtttctcgtgggagctgccacaggcgcccactctgattttgtgctgacacagtctccccacagcctgagcgttacacctggcgagtctgccagcatcagctgcaagtctagccactctctgatccacggcgaccggaacaactacctggcttggtacgtgcagaagcccggcagatctcctcagctgctgatctacctggccagcagcagagcttctggcgtgcccgatagattttctggcagcggcagcgacaaggacttcaccctgaagatctccagagtggaaaccgaggacgtgggcacctactactgtatgcagggcagagagagcccctggacatttggccagggcaccaaggtggacatcaaaggcggcggaggaagcggaggcggaggttctggtggcggaggctcaggcggtggcggatctcaagttcatctgacacagagcggccctgaagtgcggaagcctggcacaagcgtgaaggtgtcctgtaaagcccctggcaacaccctgaaaacctacgacctgcactgggtccgatctgtgcctggacagggactgcaatggatgggctggattagccacgagggcgacaagaaagtgatcgtggaacggttcaaggccaaagtgaccatcgactgggacagaagcaccaacaccgcctacctgcagctgagcggactgacatctggcgataccgccgtgtactactgtgccaagggcagcaagcaccggctgagagattacgccctgtacgacgatgacggcgccctgaattgggccgtcgatgtggactacctgagcaacctggaattctggggccagggaacagccgtgacagtgtcttccggcggaggtggaagtggtggtggcggtagcggaggcggtgggtccggaggtggtggatctgaacctaagagcagcgacaagacccacacctgtcctccatgtcctgctccagaactgctgggcggaccttccgtgttcctgtttcctccaaagcctaaggacaccctgatgatcagcagaacccctgaagtgacctgcgtggtggtggatgtgtctcacgaggaccctgaagtgaagttcaattggtacgtggacggcgtggaagtgcacaacgccaagaccaagcctagagaggaacagtacaacagcacctacagagtggtgtccgtgctgaccgtgctgcaccaggattggctgaacggcaaagagtacaagtgcaaggtgtccaacaaggccctgcctgcccctgaggaaaagaccatcagcaaggccaagggccagcctagggaaccccaagtctgtacactgcctcctagccgcgaggaaatgaccaagaaccaggtgtccctgagctgcgccgtgaagggcttttacccttccgatatcgccgtggaatgggagagcaatggccagcctgagaacaactacaagacaacccctcctgtgctggacagcgacggctcattcttcctggtgtccaagctgacagtggacaagagcagatggcagcagggcaacgtgttcagctgctctgtgctgcacgaagccctgcacagccactacacccagaagtccctgtctctgagccccggcaagtgataaggatccgatctggtactgcatgcacgcaatgctagctgcccctttcccgtcctgggtaccccgagtctcccccgacctcgggtcccaggtatgctcccacctccacctgccccactcaccacctctgctagttccagacacctcccaagcacgcagcaatgcagctcaaaacgcttagcctagccacacccccacgggaaacagcagtgattaacctttagcaataaacgaaagtttaactaagctatactaaccccagggttggtcaatttcgtgccagccacaccctcgagctagcaaaaaaaaaaaaaaaaaaaaaaaaaaaaaagcatatgactaaaaaaaaaaaaaaaaaaaaaaaaaaaaaaaaaaaaaaaaaaaaaaaaaaaaaaaaaaaaaaaaaaaaaa

SEQ ID NO: 1058 - RNA, 2099 nt, synthetic construct
  source 1..2099: mol_type = other RNA
agaataaactagtattcttctggtccccacagactcagagagaacccgccaccatggattggatctggcgcatcctgtttctcgtgggagctgccacaggcgcccactctgattttgtgctgacacagtctccccacagcctgagcgttacacctggcgagtctgccagcatcagctgcaagtctagccactctctgatccacggcgaccggaacaactacctggcttggtacgtgcagaagcccggcagatctcctcagctgctgatctacctggccagcagcagagcttctggcgtgcccgatagattttctggcagcggcagcgacaaggacttcaccctgaagatctccagagtggaaaccgaggacgtgggcacctactactgtatgcagggcagagagagcccctggacatttggccagggcaccaaggtggacatcaaaggcggcggaggaagcggaggcggaggttctggtggcggaggctcaggcggtggcggatctcaagttcatctgacacagagcggccctgaagtgcggaagcctggcacaagcgtgaaggtgtcctgtaaagcccctggcaacaccctgaaaacctacgacctgcactgggtccgatctgtgcctggacagggactgcaatggatgggctggattagccacgagggcgacaagaaagtgatcgtggaacggttcaaggccaaagtgaccatcgactgggacagaagcaccaacaccgcctacctgcagctgagcggactgacatctggcgataccgccgtgtactactgtgccaagggcagcaagcaccggctgagagattacgccctgtacgacgatgacggcgccctgaattgggccgtcgatgtggactacctgagcaacctggaattctggggccagggaacagccgtgacagtgtcttccggcggaggtggaagtggtggtggcggtagcggaggcggtgggtccggaggtggtggatctgaacctaagagcagcgacaagacccacacctgtcctccatgtcctgctccagaactgctcggcggaccttccgtgttcctgtttcctccaaagcctaaggacaccctgatgatcagcagaacccctgaagtgacctgcgtggtggtggatgtgtctcacgaggaccccgaagtgaagttcaattggtacgtggacggcgtggaagtgcacaacgccaagaccaagcctagagaggaacagtacaacagcacctacagagtggtgtccgtgctgacagtgctgcaccaggattggctgaacggcaaagagtacaagtgcaaggtgtccaacaaggccctgcctgctcctatcgagaaaaccatcagcaaggccaagggccagcctagggaaccccaggtttacaccctgcctccatgccgcgaggaaatgaccaagaaccaggtgtccctgtggtgcctcgtgaagggcttctacccttccgatatcgccgtggaatgggagagcaatggccagcctgagaacaactacaagacaacccctcctgtgctggacagcgacggctcattcttcctgtacagcaagctgaccgtggacaagtccagatggcagcagggcaacgtgttcagctgtagcgtgctgcacgaagccctgcacagccactacacccagaagtccctgtctctgagccccggcaagtgataaggatccgatctggtactgcatgcacgcaatgctagctgcccctttcccgtcctgggtaccccgagtctcccccgacctcgggtcccaggtatgctcccacctccacctgccccactcaccacctctgctagttccagacacctcccaagcacgcagcaatgcagctcaaaacgcttagcctagccacacccccacgggaaacagcagtgattaacctttagcaataaacgaaagtttaactaagctatactaaccccagggttggtcaatttcgtgccagccacaccctcgagctagcaaaaaaaaaaaaaaaaaaaaaaaaaaaaaagcatatgactaaaaaaaaaaaaaaaaaaaaaaaaaaaaaaaaaaaaaaaaaaaaaaaaaaaaaaaaaaaaaaaaaaaaaa

SEQ ID NO: 1059 - RNA, 2099 nt, synthetic construct
  source 1..2099: mol_type = other RNA
agaataaactagtattcttctggtccccacagactcagagagaacccgccaccatggattggatctggcgcatcctgtttctcgtgggagctgccacaggcgcccactctgattttgtgctgacacagtctccccacagcctgagcgttacacctggcgagtctgccagcatcagctgcaagtctagccactctctgatccacggcgaccggaacaactacctggcttggtacgtgcagaagcccggcagatctcctcagctgctgatctacctggccagcagcagagcttctggcgtgcccgatagattttctggcagcggcagcgacaaggacttcaccctgaagatctccagagtggaaaccgaggacgtgggcacctactactgtatgcagggcagagagagcccctggacatttggccagggcaccaaggtggacatcaaaggcggcggaggaagcggaggcggaggttctggtggcggaggctcaggcggtggcggatctcaagttcatctgacacagagcggccctgaagtgcggaagcctggcacaagcgtgaaggtgtcctgtaaagcccctggcaacaccctgaaaacctacgacctgcactgggtccgatctgtgcctggacagggactgcaatggatgggctggattagccacgagggcgacaagaaagtgatcgtggaacggttcaaggccaaagtgaccatcgactgggacagaagcaccaacaccgcctacctgcagctgagcggactgacatctggcgataccgccgtgtactactgtgccaagggcagcaagcaccggctgagagattacgccctgtacgacgatgacggcgccctgaattgggccgtcgatgtggactacctgagcaacctggaattctggggccagggaacagccgtgacagtgtcttccggcggaggtggaagtggtggtggcggtagcggaggcggtgggtccggaggtggtggatctgaacctaagagcagcgacaagacccacacctgtcctccatgtcctgctccagaactgctggccggaccttccgtgttcctgtttcctccaaagcctaaggacaccctgatgatcagcagaacccctgaagtgacctgcgtggtggtggatgtgtctcacgaggaccccgaagtgaagttcaattggtacgtggacggcgtggaagtgcacaatgccaagaccaagcctagagaggaacagtacaacagcacctacagagtggtgtccgtgctgaccgtgctgcaccaggattggctgaacggcaaagagtacaagtgcaaggtgtccaacaaggccctgcctctgcctgaggaaaagaccatcagcaaggccaagggccagcctagggaaccccaggtttacaccctgcctccatgccgcgaggaaatgaccaagaaccaggtgtccctgtggtgcctcgtgaagggcttctacccttccgatatcgccgtggaatgggagagcaatggccagcctgagaacaactacaagacaacccctcctgtgctggacagcgacggctcattcttcctgtacagcaagctgaccgtggacaagtccagatggcagcagggcaacgtgttcagctgtagcgtgctgcacgaagccctgcacagccactacacccagaagtccctgtctctgagccccggcaagtgataaggatccgatctggtactgcatgcacgcaatgctagctgcccctttcccgtcctgggtaccccgagtctcccccgacctcgggtcccaggtatgctcccacctccacctgccccactcaccacctctgctagttccagacacctcccaagcacgcagcaatgcagctcaaaacgcttagcctagccacacccccacgggaaacagcagtgattaacctttagcaataaacgaaagtttaactaagctatactaaccccagggttggtcaatttcgtgccagccacaccctcgagctagcaaaaaaaaaaaaaaaaaaaaaaaaaaaaaagcatatgactaaaaaaaaaaaaaaaaaaaaaaaaaaaaaaaaaaaaaaaaaaaaaaaaaaaaaaaaaaaaaaaaaaaaaa

SEQ ID NO: 1060 - RNA, 2099 nt, synthetic construct
  source 1..2099: mol_type = other RNA
agaataaactagtattcttctggtccccacagactcagagagaacccgccaccatggattggatctggcgcatcctgtttctcgtgggagctgccacaggcgcccactctgattttgtgctgacacagtctccccacagcctgagcgttacacctggcgagtctgccagcatcagctgcaagtctagccactctctgatccacggcgaccggaacaactacctggcttggtacgtgcagaagcccggcagatctcctcagctgctgatctacctggccagcagcagagcttctggcgtgcccgatagattttctggcagcggcagcgacaaggacttcaccctgaagatctccagagtggaaaccgaggacgtgggcacctactactgtatgcagggcagagagagcccctggacatttggccagggcaccaaggtggacatcaaaggcggcggaggaagcggaggcggaggttctggtggcggaggctcaggcggtggcggatctcaagttcatctgacacagagcggccctgaagtgcggaagcctggcacaagcgtgaaggtgtcctgtaaagcccctggcaacaccctgaaaacctacgacctgcactgggtccgatctgtgcctggacagggactgcaatggatgggctggattagccacgagggcgacaagaaagtgatcgtggaacggttcaaggccaaagtgaccatcgactgggacagaagcaccaacaccgcctacctgcagctgagcggactgacatctggcgataccgccgtgtactactgtgccaagggcagcaagcaccggctgagagattacgccctgtacgacgatgacggcgccctgaattgggccgtcgatgtggactacctgagcaacctggaattctggggccagggaacagccgtgacagtgtcttccggcggaggtggaagtggtggtggcggtagcggaggcggtgggtccggaggtggtggatctgaacctaagagcagcgacaagacccacacctgtcctccatgtcctgctccagaactgctggccggaccttccgtgttcctgtttcctccaaagcctaaggacaccctgatgatcagcagaacccctgaagtgacctgcgtggtggtggatgtgtctcacgaggaccctgaagtgaagttcaattggtacgtggacggcgtggaagtgcacaacgccaagaccaagcctagagaggaacagtacaacagcacctacagagtggtgtccgtgctgaccgtgctgcaccaggattggctgaacggcaaagagtacaagtgcaaggtgtccaacaaggccctgcctgcccctgaggaaaagaccatcagcaaggccaagggccagcctagggaaccccaggtttacaccctgcctccatgccgcgaggaaatgaccaagaaccaggtgtccctgtggtgcctcgtgaagggcttctacccttccgatatcgccgtggaatgggagagcaatggccagcctgagaacaactacaagacaacccctcctgtgctggacagcgacggctcattcttcctgtacagcaagctgaccgtggacaagtccagatggcagcagggcaacgtgttcagctgtagcgtgctgcacgaagccctgcacagccactacacccagaagtccctgtctctgagccccggcaagtgataaggatccgatctggtactgcatgcacgcaatgctagctgcccctttcccgtcctgggtaccccgagtctcccccgacctcgggtcccaggtatgctcccacctccacctgccccactcaccacctctgctagttccagacacctcccaagcacgcagcaatgcagctcaaaacgcttagcctagccacacccccacgggaaacagcagtgattaacctttagcaataaacgaaagtttaactaagctatactaaccccagggttggtcaatttcgtgccagccacaccctcgagctagcaaaaaaaaaaaaaaaaaaaaaaaaaaaaaagcatatgactaaaaaaaaaaaaaaaaaaaaaaaaaaaaaaaaaaaaaaaaaaaaaaaaaaaaaaaaaaaaaaaaaaaaaa

SEQ ID NO: 1061 - RNA, 2099 nt, synthetic construct
  source 1..2099: mol_type = other RNA
agaataaactagtattcttctggtccccacagactcagagagaacccgccaccatggattggatctggcgcatcctgtttctcgtgggagctgccacaggcgcccactctgattttgtgctgacacagtctccccacagcctgagcgttacacctggcgagtctgccagcatcagctgcaagtctagccactctctgatccacggcgaccggaacaactacctggcttggtacgtgcagaagcccggcagatctcctcagctgctgatctacctggccagcagcagagcttctggcgtgcccgatagattttctggcagcggcagcgacaaggacttcaccctgaagatctccagagtggaaaccgaggacgtgggcacctactactgtatgcagggcagagagagcccctggacatttggccagggcaccaaggtggacatcaaaggcggcggaggaagcggaggcggaggttctggtggcggaggctcaggcggtggcggatctcaagttcatctgacacagagcggccctgaagtgcggaagcctggcacaagcgtgaaggtgtcctgtaaagcccctggcaacaccctgaaaacctacgacctgcactgggtccgatctgtgcctggacagggactgcaatggatgggctggattagccacgagggcgacaagaaagtgatcgtggaacggttcaaggccaaagtgaccatcgactgggacagaagcaccaacaccgcctacctgcagctgagcggactgacatctggcgataccgccgtgtactactgtgccaagggcagcaagcaccggctgagagattacgccctgtacgacgatgacggcgccctgaattgggccgtcgatgtggactacctgagcaacctggaattctggggccagggaacagccgtgacagtgtcttccggcggaggtggaagtggtggtggcggtagcggaggcggtgggtccggaggtggtggatctgaacctaagagcagcgacaagacccacacctgtcctccatgtcctgctccagaactgctggccggaccttccgtgttcctgtttcctccaaagcctaaggacaccctgatgatcagcagaacccctgaagtgacctgcgtggtggtggatgtgtctcacgaggaccctgaagtgaagttcaattggtacgtggacggcgtggaagtgcacaacgccaagaccaagcctagagaggaacagtacaacagcacctacagagtggtgtccgtgctgaccgtgctgcaccaggattggctgaacggcaaagagtacaagtgcaaggtgtccaacaaggccctgcctgcccctatcgaaaagaccatcagcaaggccaagggccagcctagggaaccccaggtttacaccctgcctccatgccgcgaggaaatgaccaagaaccaggtgtccctgtggtgcctcgtgaagggcttctacccttccgatatcgccgtggaatgggagagcaatggccagcctgagaacaactacaagacaacccctcctgtgctggacagcgacggctcattcttcctgtacagcaagctgaccgtggacaagtccagatggcagcagggcaacgtgttcagctgtagcgtgctgcacgaagccctgcacagccactacacccagaagtccctgtctctgagccccggcaagtgataaggatccgatctggtactgcatgcacgcaatgctagctgcccctttcccgtcctgggtaccccgagtctcccccgacctcgggtcccaggtatgctcccacctccacctgccccactcaccacctctgctagttccagacacctcccaagcacgcagcaatgcagctcaaaacgcttagcctagccacacccccacgggaaacagcagtgattaacctttagcaataaacgaaagtttaactaagctatactaaccccagggttggtcaatttcgtgccagccacaccctcgagctagcaaaaaaaaaaaaaaaaaaaaaaaaaaaaaagcatatgactaaaaaaaaaaaaaaaaaaaaaaaaaaaaaaaaaaaaaaaaaaaaaaaaaaaaaaaaaaaaaaaaaaaaaa

SEQ ID NO: 1062 - RNA, 2099 nt, synthetic construct
  source 1..2099: mol_type = other RNA
agaataaactagtattcttctggtccccacagactcagagagaacccgccaccatggattggatctggcgcatcctgtttctcgtgggagctgccacaggcgcccactctgattttgtgctgacacagtctccccacagcctgagcgttacacctggcgagtctgccagcatcagctgcaagtctagccactctctgatccacggcgaccggaacaactacctggcttggtacgtgcagaagcccggcagatctcctcagctgctgatctacctggccagcagcagagcttctggcgtgcccgatagattttctggcagcggcagcgacaaggacttcaccctgaagatctccagagtggaaaccgaggacgtgggcacctactactgtatgcagggcagagagagcccctggacatttggccagggcaccaaggtggacatcaaaggcggcggaggaagcggaggcggaggttctggtggcggaggctcaggcggtggcggatctcaagttcatctgacacagagcggccctgaagtgcggaagcctggcacaagcgtgaaggtgtcctgtaaagcccctggcaacaccctgaaaacctacgacctgcactgggtccgatctgtgcctggacagggactgcaatggatgggctggattagccacgagggcgacaagaaagtgatcgtggaacggttcaaggccaaagtgaccatcgactgggacagaagcaccaacaccgcctacctgcagctgagcggactgacatctggcgataccgccgtgtactactgtgccaagggcagcaagcaccggctgagagattacgccctgtacgacgatgacggcgccctgaattgggccgtcgatgtggactacctgagcaacctggaattctggggccagggaacagccgtgacagtgtcttccggcggaggtggaagtggtggtggcggtagcggaggcggtgggtccggaggtggtggatctgaacctaagagcagcgacaagacccacacctgtcctccatgtcctgctccagaactgctgggcggaccttccgtgttcctgtttcctccaaagcctaaggacaccctgatgatcagcagaacccctgaagtgacctgcgtggtggtggatgtgtctcacgaggaccctgaagtgaagttcaattggtacgtggacggcgtggaagtgcacaacgccaagaccaagcctagagaggaacagtacaacagcacctacagagtggtgtccgtgctgaccgtgctgcaccaggattggctgaacggcaaagagtacaagtgcaaggtgtccaacaaggccctgcctgcccctgaggaaaagaccatcagcaaggccaagggccagcctagggaaccccaggtttacaccctgcctccatgccgcgaggaaatgaccaagaaccaggtgtccctgtggtgcctcgtgaagggcttctacccttccgatatcgccgtggaatgggagagcaatggccagcctgagaacaactacaagacaacccctcctgtgctggacagcgacggctcattcttcctgtacagcaagctgaccgtggacaagtccagatggcagcagggcaacgtgttcagctgtagcgtgctgcacgaagccctgcacagccactacacccagaagtccctgtctctgagccccggcaagtgataaggatccgatctggtactgcatgcacgcaatgctagctgcccctttcccgtcctgggtaccccgagtctcccccgacctcgggtcccaggtatgctcccacctccacctgccccactcaccacctctgctagttccagacacctcccaagcacgcagcaatgcagctcaaaacgcttagcctagccacacccccacgggaaacagcagtgattaacctttagcaataaacgaaagtttaactaagctatactaaccccagggttggtcaatttcgtgccagccacaccctcgagctagcaaaaaaaaaaaaaaaaaaaaaaaaaaaaaagcatatgactaaaaaaaaaaaaaaaaaaaaaaaaaaaaaaaaaaaaaaaaaaaaaaaaaaaaaaaaaaaaaaaaaaaaaa

SEQ ID NO: 1063 - RNA, 2099 nt, synthetic construct; identical to SEQ ID NO: 1047
  source 1..2099: mol_type = other RNA

SEQ ID NO: 1064 - RNA, 2099 nt, synthetic construct; identical to SEQ ID NO: 1048
  source 1..2099: mol_type = other RNA

SEQ ID NO: 1065 - RNA, 2099 nt, synthetic construct; identical to SEQ ID NO: 1049
  source 1..2099: mol_type = other RNA

SEQ ID NO: 1066 - RNA, 2099 nt, synthetic construct; identical to SEQ ID NO: 1050
  source 1..2099: mol_type = other RNA

SEQ ID NO: 1067 - RNA, 2099 nt, synthetic construct; identical to SEQ ID NO: 1051
  source 1..2099: mol_type = other RNA

SEQ ID NO: 1068 - RNA, 2099 nt, synthetic construct; identical to SEQ ID NO: 1052
  source 1..2099: mol_type = other RNA

SEQ ID NO: 1069 - RNA, 2099 nt, synthetic construct; identical to SEQ ID NO: 1053
  source 1..2099: mol_type = other RNA

SEQ ID NO: 1070 - RNA, 2099 nt, synthetic construct; identical to SEQ ID NO: 1054
  source 1..2099: mol_type = other RNA

SEQ ID NO: 1071 - RNA, 2099 nt, synthetic construct; identical to SEQ ID NO: 1055
  source 1..2099: mol_type = other RNA

SEQ ID NO: 1072 - RNA, 2099 nt, synthetic construct; identical to SEQ ID NO: 1056
  source 1..2099: mol_type = other RNA

SEQ ID NO: 1073 - RNA, 2099 nt, synthetic construct; identical to SEQ ID NO: 1057
  source 1..2099: mol_type = other RNA

SEQ ID NO: 1074 - RNA, 2099 nt, synthetic construct; identical to SEQ ID NO: 1058
  source 1..2099: mol_type = other RNA

SEQ ID NO: 1075 - RNA, 2099 nt, synthetic construct; identical to SEQ ID NO: 1059
  source 1..2099: mol_type = other RNA

SEQ ID NO: 1076 - RNA, 2099 nt, synthetic construct; identical to SEQ ID NO: 1060
  source 1..2099: mol_type = other RNA

SEQ ID NO: 1077 - RNA, 2099 nt, synthetic construct; identical to SEQ ID NO: 1061
  source 1..2099: mol_type = other RNA

SEQ ID NO: 1078 - RNA, 2099 nt, synthetic construct; identical to SEQ ID NO: 1062
  source 1..2099: mol_type = other RNA

SEQ ID NO: 1079 - RNA, 2099 nt, synthetic construct
  source 1..2099: mol_type = other RNA
agaataaactagtattcttctggtccccacagactcagagagaacccgccaccatggattggatctggcgcatcctgtttctcgtgggagctgccacaggcgcccactctgattttgtgctgacacagtctccccacagcctgagcgttacacctggcgagtctgccagcatcagctgcaagtctagccactctctgatccacggcgaccggaacaactacctggcttggtacgtgcagaagcccggcagatctcctcagctgctgatctacctggccagcagcagagcttctggcgtgcccgatagattttctggcagcggcagcgacaaggacttcaccctgaagatctccagagtggaaaccgaggacgtgggcacctactactgtatgcagggcagagagagcccctggacatttggccagggcaccaaggtggacatcaaaggcggcggaggaagcggaggcggaggttctggtggcggaggctcaggcggtggcggatctcaagttcatctgacacagagcggccctgaagtgcggaagcctggcacaagcgtgaaggtgtcctgtaaagcccctggcaacaccctgaaaacctacgacctgcactgggtccgatctgtgcctggacagggactgcaatggatgggctggattagccacgagggcgacaagaaagtgatcgtggaacggttcaaggccaaagtgaccatcgactgggacagaagcaccaacaccgcctacctgcagctgagcggactgacatctggcgataccgccgtgtactactgtgccaagggcagcaagcaccggctgagagattacgccctgtacgacgatgacggcgccctgaattgggccgtcgatgtggactacctgagcaacctggaattctggggccagggaacagccgtgacagtgtcttccggcggaggtggaagtggtggtggcggtagcggaggcggtgggtccggaggtggtggatctgaacctaagagcagcgacaagacccacacctgtcctccatgtcctgctccagaactgctcggcggaccttccgtgttcctgtttcctccaaagcctaaggacaccctgatgatcagcagaacccctgaagtgacctgcgtggtggtggatgtgtctcacgaggaccccgaagtgaagttcaattggtacgtggacggcgtggaagtgcacaacgccaagaccaagcctagagaggaacagtacaacagcacctacagagtggtgtccgtgctgacagtgctgcaccaggattggctgaacggcaaagagtacaagtgcaaggtgtccaacaaggccctgcctgctcctatcgagaaaaccatcagcaaggccaagggccagcctagggaaccccaggtttacacactgcctccaagccgcgacgaactgaccaagaaccaggtgtccctgacctgcctcgtgaagggcttctacccttccgatatcgccgtggaatgggagagcaatggccagcctgagaacaactacaagacaacccctcctgtgctggacagcgacggctcattcttcctgtacagcaagctgactgtggataagtcccggtggcagcagggcaacgtgttcagctgttctgtgatgcacgaagccctgcacaaccactacacccagaaaagcctgtctctgagccccggcaagtgataaggatccgatctggtactgcatgcacgcaatgctagctgcccctttcccgtcctgggtaccccgagtctcccccgacctcgggtcccaggtatgctcccacctccacctgccccactcaccacctctgctagttccagacacctcccaagcacgcagcaatgcagctcaaaacgcttagcctagccacacccccacgggaaacagcagtgattaacctttagcaataaacgaaagtttaactaagctatactaaccccagggttggtcaatttcgtgccagccacaccctcgagctagcaaaaaaaaaaaaaaaaaaaaaaaaaaaaaagcatatgactaaaaaaaaaaaaaaaaaaaaaaaaaaaaaaaaaaaaaaaaaaaaaaaaaaaaaaaaaaaaaaaaaaaaaa

SEQ ID NO: 1080 - RNA, 2099 nt, synthetic construct
  source 1..2099: mol_type = other RNA
agaataaactagtattcttctggtccccacagactcagagagaacccgccaccatggattggatctggcgcatcctgtttctcgtgggagctgccacaggcgcccactctgattttgtgctgacacagtctccccacagcctgagcgttacacctggcgagtctgccagcatcagctgcaagtctagccactctctgatccacggcgaccggaacaactacctggcttggtacgtgcagaagcccggcagatctcctcagctgctgatctacctggccagcagcagagcttctggcgtgcccgatagattttctggcagcggcagcgacaaggacttcaccctgaagatctccagagtggaaaccgaggacgtgggcacctactactgtatgcagggcagagagagcccctggacatttggccagggcaccaaggtggacatcaaaggcggcggaggaagcggaggcggaggttctggtggcggaggctcaggcggtggcggatctcaagttcatctgacacagagcggccctgaagtgcggaagcctggcacaagcgtgaaggtgtcctgtaaagcccctggcaacaccctgaaaacctacgacctgcactgggtccgatctgtgcctggacagggactgcaatggatgggctggattagccacgagggcgacaagaaagtgatcgtggaacggttcaaggccaaagtgaccatcgactgggacagaagcaccaacaccgcctacctgcagctgagcggactgacatctggcgataccgccgtgtactactgtgccaagggcagcaagcaccggctgagagattacgccctgtacgacgatgacggcgccctgaattgggccgtcgatgtggactacctgagcaacctggaattctggggccagggaacagccgtgacagtgtcttccggcggaggtggaagtggtggtggcggtagcggaggcggtgggtccggaggtggtggatctgaacctaagagcagcgacaagacccacacctgtcctccatgtcctgctccagaactgctcggcggaccttccgtgttcctgtttcctccaaagcctaaggacaccctgatgatcagcagaacccctgaagtgacctgcgtggtggtggatgtgtctcacgaggaccccgaagtgaagttcaattggtacgtggacggcgtggaagtgcacaacgccaagaccaagcctagagaggaacagtacaacagcacctacagagtggtgtccgtgctgacagtgctgcaccaggattggctgaacggcaaagagtacaagtgcaaggtgtccaacaaggccctgcctgctcctatcgagaaaaccatcagcaaggccaagggccagcctagggaaccccaggtttacacactgcctccaagccgcgacgaactgaccaagaaccaggtgtccctgacctgcctcgtgaagggcttctacccttccgatatcgccgtggaatgggagagcaatggccagcctgagaacaactacaagacaacccctcctgtgctggacagcgacggctcattcttcctgtacagcaagctgaccgtggacaagtccagatggcagcagggcaacgtgttcagctgtagcgtgctgcacgaagccctgcacagccactacacccagaaaagcctgtctctgagccccggcaaatgataaggatccgatctggtactgcatgcacgcaatgctagctgcccctttcccgtcctgggtaccccgagtctcccccgacctcgggtcccaggtatgctcccacctccacctgccccactcaccacctctgctagttccagacacctcccaagcacgcagcaatgcagctcaaaacgcttagcctagccacacccccacgggaaacagcagtgattaacctttagcaataaacgaaagtttaactaagctatactaaccccagggttggtcaatttcgtgccagccacaccctcgagctagcaaaaaaaaaaaaaaaaaaaaaaaaaaaaaagcatatgactaaaaaaaaaaaaaaaaaaaaaaaaaaaaaaaaaaaaaaaaaaaaaaaaaaaaaaaaaaaaaaaaaaaaaa

SEQ ID NO: 1081 - RNA, 2099 nt, synthetic construct
  source 1..2099: mol_type = other RNA
agaataaactagtattcttctggtccccacagactcagagagaacccgccaccatggattggatctggcgcatcctgtttctcgtgggagctgccacaggcgcccactctgattttgtgctgacacagtctccccacagcctgagcgttacacctggcgagtctgccagcatcagctgcaagtctagccactctctgatccacggcgaccggaacaactacctggcttggtacgtgcagaagcccggcagatctcctcagctgctgatctacctggccagcagcagagcttctggcgtgcccgatagattttctggcagcggcagcgacaaggacttcaccctgaagatctccagagtggaaaccgaggacgtgggcacctactactgtatgcagggcagagagagcccctggacatttggccagggcaccaaggtggacatcaaaggcggcggaggaagcggaggcggaggttctggtggcggaggctcaggcggtggcggatctcaagttcatctgacacagagcggccctgaagtgcggaagcctggcacaagcgtgaaggtgtcctgtaaagcccctggcaacaccctgaaaacctacgacctgcactgggtccgatctgtgcctggacagggactgcaatggatgggctggattagccacgagggcgacaagaaagtgatcgtggaacggttcaaggccaaagtgaccatcgactgggacagaagcaccaacaccgcctacctgcagctgagcggactgacatctggcgataccgccgtgtactactgtgccaagggcagcaagcaccggctgagagattacgccctgtacgacgatgacggcgccctgaattgggccgtcgatgtggactacctgagcaacctggaattctggggccagggaacagccgtgacagtgtcttccggcggaggtggaagtggtggtggcggtagcggaggcggtgggtccggaggtggtggatctgaacctaagagcagcgacaagacccacacctgtcctccatgtcctgctccagaactgctggccggaccttccgtgttcctgtttcctccaaagcctaaggacaccctgatgatcagcagaacccctgaagtgacctgcgtggtggtggatgtgtctcacgaggaccccgaagtgaagttcaattggtacgtggacggcgtggaagtgcacaatgccaagaccaagcctagagaggaacagtacaacagcacctacagagtggtgtccgtgctgaccgtgctgcaccaggattggctgaacggcaaagagtacaagtgcaaggtgtccaacaaggccctgcctctgcctgaggaaaagaccatcagcaaggccaagggccagcctagggaaccccaggtttacacactgcctccaagccgcgacgaactgaccaagaaccaggtgtccctgacctgcctcgtgaagggcttctacccttccgatatcgccgtggaatgggagagcaatggccagcctgagaacaactacaagacaacccctcctgtgctggacagcgacggctcattcttcctgtacagcaagctgaccgtggacaagtccagatggcagcagggcaacgtgttcagctgtagcgtgctgcacgaagccctgcacagccactacacccagaaaagcctgtctctgagccccggcaaatgataaggatccgatctggtactgcatgcacgcaatgctagctgcccctttcccgtcctgggtaccccgagtctcccccgacctcgggtcccaggtatgctcccacctccacctgccccactcaccacctctgctagttccagacacctcccaagcacgcagcaatgcagctcaaaacgcttagcctagccacacccccacgggaaacagcagtgattaacctttagcaataaacgaaagtttaactaagctatactaaccccagggttggtcaatttcgtgccagccacaccctcgagctagcaaaaaaaaaaaaaaaaaaaaaaaaaaaaaagcatatgactaaaaaaaaaaaaaaaaaaaaaaaaaaaaaaaaaaaaaaaaaaaaaaaaaaaaaaaaaaaaaaaaaaaaaa

SEQ ID NO: 1082 - RNA, 2099 nt, synthetic construct
  source 1..2099: mol_type = other RNA
agaataaactagtattcttctggtccccacagactcagagagaacccgccaccatggattggatctggcgcatcctgtttctcgtgggagctgccacaggcgcccactctgattttgtgctgacacagtctccccacagcctgagcgttacacctggcgagtctgccagcatcagctgcaagtctagccactctctgatccacggcgaccggaacaactacctggcttggtacgtgcagaagcccggcagatctcctcagctgctgatctacctggccagcagcagagcttctggcgtgcccgatagattttctggcagcggcagcgacaaggacttcaccctgaagatctccagagtggaaaccgaggacgtgggcacctactactgtatgcagggcagagagagcccctggacatttggccagggcaccaaggtggacatcaaaggcggcggaggaagcggaggcggaggttctggtggcggaggctcaggcggtggcggatctcaagttcatctgacacagagcggccctgaagtgcggaagcctggcacaagcgtgaaggtgtcctgtaaagcccctggcaacaccctgaaaacctacgacctgcactgggtccgatctgtgcctggacagggactgcaatggatgggctggattagccacgagggcgacaagaaagtgatcgtggaacggttcaaggccaaagtgaccatcgactgggacagaagcaccaacaccgcctacctgcagctgagcggactgacatctggcgataccgccgtgtactactgtgccaagggcagcaagcaccggctgagagattacgccctgtacgacgatgacggcgccctgaattgggccgtcgatgtggactacctgagcaacctggaattctggggccagggaacagccgtgacagtgtcttccggcggaggtggaagtggtggtggcggtagcggaggcggtgggtccggaggtggtggatctgaacctaagagcagcgacaagacccacacctgtcctccatgtcctgctccagaactgctggccggaccttccgtgttcctgtttcctccaaagcctaaggacaccctgatgatcagcagaacccctgaagtgacctgcgtggtggtggatgtgtctcacgaggaccctgaagtgaagttcaattggtacgtggacggcgtggaagtgcacaacgccaagaccaagcctagagaggaacagtacaacagcacctacagagtggtgtccgtgctgaccgtgctgcaccaggattggctgaacggcaaagagtacaagtgcaaggtgtccaacaaggccctgcctgcccctgaggaaaagaccatcagcaaggccaagggccagcctagggaaccccaggtttacacactgcctccaagccgcgacgaactgaccaagaaccaggtgtccctgacctgcctcgtgaagggcttctacccttccgatatcgccgtggaatgggagagcaatggccagcctgagaacaactacaagacaacccctcctgtgctggacagcgacggctcattcttcctgtacagcaagctgaccgtggacaagtccagatggcagcagggcaacgtgttcagctgtagcgtgctgcacgaagccctgcacagccactacacccagaaaagcctgtctctgagccccggcaaatgataaggatccgatctggtactgcatgcacgcaatgctagctgcccctttcccgtcctgggtaccccgagtctcccccgacctcgggtcccaggtatgctcccacctccacctgccccactcaccacctctgctagttccagacacctcccaagcacgcagcaatgcagctcaaaacgcttagcctagccacacccccacgggaaacagcagtgattaacctttagcaataaacgaaagtttaactaagctatactaaccccagggttggtcaatttcgtgccagccacaccctcgagctagcaaaaaaaaaaaaaaaaaaaaaaaaaaaaaagcatatgactaaaaaaaaaaaaaaaaaaaaaaaaaaaaaaaaaaaaaaaaaaaaaaaaaaaaaaaaaaaaaaaaaaaaaa

SEQ ID NO: 1083 - RNA, 2099 nt, synthetic construct
  source 1..2099: mol_type = other RNA
agaataaactagtattcttctggtccccacagactcagagagaacccgccaccatggattggatctggcgcatcctgtttctcgtgggagctgccacaggcgcccactctgattttgtgctgacacagtctccccacagcctgagcgttacacctggcgagtctgccagcatcagctgcaagtctagccactctctgatccacggcgaccggaacaactacctggcttggtacgtgcagaagcccggcagatctcctcagctgctgatctacctggccagcagcagagcttctggcgtgcccgatagattttctggcagcggcagcgacaaggacttcaccctgaagatctccagagtggaaaccgaggacgtgggcacctactactgtatgcagggcagagagagcccctggacatttggccagggcaccaaggtggacatcaaaggcggcggaggaagcggaggcggaggttctggtggcggaggctcaggcggtggcggatctcaagttcatctgacacagagcggccctgaagtgcggaagcctggcacaagcgtgaaggtgtcctgtaaagcccctggcaacaccctgaaaacctacgacctgcactgggtccgatctgtgcctggacagggactgcaatggatgggctggattagccacgagggcgacaagaaagtgatcgtggaacggttcaaggccaaagtgaccatcgactgggacagaagcaccaacaccgcctacctgcagctgagcggactgacatctggcgataccgccgtgtactactgtgccaagggcagcaagcaccggctgagagattacgccctgtacgacgatgacggcgccctgaattgggccgtcgatgtggactacctgagcaacctggaattctggggccagggaacagccgtgacagtgtcttccggcggaggtggaagtggtggtggcggtagcggaggcggtgggtccggaggtggtggatctgaacctaagagcagcgacaagacccacacctgtcctccatgtcctgctccagaactgctggccggaccttccgtgttcctgtttcctccaaagcctaaggacaccctgatgatcagcagaacccctgaagtgacctgcgtggtggtggatgtgtctcacgaggaccctgaagtgaagttcaattggtacgtggacggcgtggaagtgcacaacgccaagaccaagcctagagaggaacagtacaacagcacctacagagtggtgtccgtgctgaccgtgctgcaccaggattggctgaacggcaaagagtacaagtgcaaggtgtccaacaaggccctgcctgcccctatcgaaaagaccatcagcaaggccaagggccagcctagggaaccccaggtttacacactgcctccaagccgcgacgaactgaccaagaaccaggtgtccctgacctgcctcgtgaagggcttctacccttccgatatcgccgtggaatgggagagcaatggccagcctgagaacaactacaagacaacccctcctgtgctggacagcgacggctcattcttcctgtacagcaagctgaccgtggacaagtccagatggcagcagggcaacgtgttcagctgtagcgtgctgcacgaagccctgcacagccactacacccagaaaagcctgtctctgagccccggcaaatgataaggatccgatctggtactgcatgcacgcaatgctagctgcccctttcccgtcctgggtaccccgagtctcccccgacctcgggtcccaggtatgctcccacctccacctgccccactcaccacctctgctagttccagacacctcccaagcacgcagcaatgcagctcaaaacgcttagcctagccacacccccacgggaaacagcagtgattaacctttagcaataaacgaaagtttaactaagctatactaaccccagggttggtcaatttcgtgccagccacaccctcgagctagcaaaaaaaaaaaaaaaaaaaaaaaaaaaaaagcatatgactaaaaaaaaaaaaaaaaaaaaaaaaaaaaaaaaaaaaaaaaaaaaaaaaaaaaaaaaaaaaaaaaaaaaaa

SEQ ID NO: 1084 - RNA, 2099 nt, synthetic construct
  source 1..2099: mol_type = other RNA
agaataaactagtattcttctggtccccacagactcagagagaacccgccaccatggattggatctggcgcatcctgtttctcgtgggagctgccacaggcgcccactctgattttgtgctgacacagtctccccacagcctgagcgttacacctggcgagtctgccagcatcagctgcaagtctagccactctctgatccacggcgaccggaacaactacctggcttggtacgtgcagaagcccggcagatctcctcagctgctgatctacctggccagcagcagagcttctggcgtgcccgatagattttctggcagcggcagcgacaaggacttcaccctgaagatctccagagtggaaaccgaggacgtgggcacctactactgtatgcagggcagagagagcccctggacatttggccagggcaccaaggtggacatcaaaggcggcggaggaagcggaggcggaggttctggtggcggaggctcaggcggtggcggatctcaagttcatctgacacagagcggccctgaagtgcggaagcctggcacaagcgtgaaggtgtcctgtaaagcccctggcaacaccctgaaaacctacgacctgcactgggtccgatctgtgcctggacagggactgcaatggatgggctggattagccacgagggcgacaagaaagtgatcgtggaacggttcaaggccaaagtgaccatcgactgggacagaagcaccaacaccgcctacctgcagctgagcggactgacatctggcgataccgccgtgtactactgtgccaagggcagcaagcaccggctgagagattacgccctgtacgacgatgacggcgccctgaattgggccgtcgatgtggactacctgagcaacctggaattctggggccagggaacagccgtgacagtgtcttccggcggaggtggaagtggtggtggcggtagcggaggcggtgggtccggaggtggtggatctgaacctaagagcagcgacaagacccacacctgtcctccatgtcctgctccagaactgctgggcggaccttccgtgttcctgtttcctccaaagcctaaggacaccctgatgatcagcagaacccctgaagtgacctgcgtggtggtggatgtgtctcacgaggaccctgaagtgaagttcaattggtacgtggacggcgtggaagtgcacaacgccaagaccaagcctagagaggaacagtacaacagcacctacagagtggtgtccgtgctgaccgtgctgcaccaggattggctgaacggcaaagagtacaagtgcaaggtgtccaacaaggccctgcctgcccctgaggaaaagaccatcagcaaggccaagggccagcctagggaaccccaggtttacacactgcctccaagccgcgacgaactgaccaagaaccaggtgtccctgacctgcctcgtgaagggcttctacccttccgatatcgccgtggaatgggagagcaatggccagcctgagaacaactacaagacaacccctcctgtgctggacagcgacggctcattcttcctgtacagcaagctgaccgtggacaagtccagatggcagcagggcaacgtgttcagctgtagcgtgctgcacgaagccctgcacagccactacacccagaaaagcctgtctctgagccccggcaaatgataaggatccgatctggtactgcatgcacgcaatgctagctgcccctttcccgtcctgggtaccccgagtctcccccgacctcgggtcccaggtatgctcccacctccacctgccccactcaccacctctgctagttccagacacctcccaagcacgcagcaatgcagctcaaaacgcttagcctagccacacccccacgggaaacagcagtgattaacctttagcaataaacgaaagtttaactaagctatactaaccccagggttggtcaatttcgtgccagccacaccctcgagctagcaaaaaaaaaaaaaaaaaaaaaaaaaaaaaagcatatgactaaaaaaaaaaaaaaaaaaaaaaaaaaaaaaaaaaaaaaaaaaaaaaaaaaaaaaaaaaaaaaaaaaaaaa

SEQ ID NO: 1085 - RNA, 2099 nt, synthetic construct
  source 1..2099: mol_type = other RNA
agaataaactagtattcttctggtccccacagactcagagagaacccgccaccatggattggatctggcgcatcctgtttctcgtgggagctgccacaggcgcccactctgattttgtgctgacacagtctccccacagcctgagcgttacacctggcgagtctgccagcatcagctgcaagtctagccactctctgatccacggcgaccggaacaactacctggcttggtacgtgcagaagcccggcagatctcctcagctgctgatctacctggccagcagcagagcttctggcgtgcccgatagattttctggcagcggcagcgacaaggacttcaccctgaagatctccagagtggaaaccgaggacgtgggcacctactactgtatgcagggcagagagagcccctggacatttggccagggcaccaaggtggacatcaaaggcggcggaggaagcggaggcggaggttctggtggcggaggctcaggcggtggcggatctcaagttcatctgacacagagcggccctgaagtgcggaagcctggcacaagcgtgaaggtgtcctgtaaagcccctggcaacaccctgaaaacctacgacctgcactgggtccgatctgtgcctggacagggactgcaatggatgggctggattagccacgagggcgacaagaaagtgatcgtggaacggttcaaggccaaagtgaccatcgactgggacagaagcaccaacaccgcctacctgcagctgagcggactgacatctggcgataccgccgtgtactactgtgccaagggcagcaagcaccggctgagagattacgccctgtacgacgatgacggcgccctgaattgggccgtcgatgtggactacctgagcaacctggaattctggggccagggaacagccgtgacagtgtcttccggcggaggtggaagtggtggtggcggtagcggaggcggtgggtccggaggtggtggatctgaacctaagagcagcgacaagacccacacctgtcctccatgtcctgctccagaactgctcggcggaccttccgtgttcctgtttcctccaaagcctaaggacaccctgatgatcagcagaacccctgaagtgacctgcgtggtggtggatgtgtctcacgaggaccccgaagtgaagttcaattggtacgtggacggcgtggaagtgcacaacgccaagaccaagcctagagaggaacagtacaacagcacctacagagtggtgtccgtgctgacagtgctgcaccaggattggctgaacggcaaagagtacaagtgcaaggtgtccaacaaggccctgcctgctcctatcgagaaaaccatcagcaaggccaagggccagcctcgcgaacctcaagtctgtacactgcctcctagccgcgacgaactgaccaagaaccaggtgtccctgagctgcgccgtgaagggcttttacccttccgatatcgccgtggaatgggagagcaatggccagcctgagaacaactacaagacaacccctcctgtgctggacagcgacggctcattcttcctggtgtccaagctgacagtggacaagagcagatggcagcagggcaacgtgttcagctgcagcgtgctgcatgaagccctgcacagccactacacccagaagtccctgtctctgagccccggcaagtgataaggatccgatctggtactgcatgcacgcaatgctagctgcccctttcccgtcctgggtaccccgagtctcccccgacctcgggtcccaggtatgctcccacctccacctgccccactcaccacctctgctagttccagacacctcccaagcacgcagcaatgcagctcaaaacgcttagcctagccacacccccacgggaaacagcagtgattaacctttagcaataaacgaaagtttaactaagctatactaaccccagggttggtcaatttcgtgccagccacaccctcgagctagcaaaaaaaaaaaaaaaaaaaaaaaaaaaaaagcatatgactaaaaaaaaaaaaaaaaaaaaaaaaaaaaaaaaaaaaaaaaaaaaaaaaaaaaaaaaaaaaaaaaaaaaaa

SEQ ID NO: 1086 - RNA, 2099 nt, synthetic construct
  source 1..2099: mol_type = other RNA
agaataaactagtattcttctggtccccacagactcagagagaacccgccaccatggattggatctggcgcatcctgtttctcgtgggagctgccacaggcgcccactctgattttgtgctgacacagtctccccacagcctgagcgttacacctggcgagtctgccagcatcagctgcaagtctagccactctctgatccacggcgaccggaacaactacctggcttggtacgtgcagaagcccggcagatctcctcagctgctgatctacctggccagcagcagagcttctggcgtgcccgatagattttctggcagcggcagcgacaaggacttcaccctgaagatctccagagtggaaaccgaggacgtgggcacctactactgtatgcagggcagagagagcccctggacatttggccagggcaccaaggtggacatcaaaggcggcggaggaagcggaggcggaggttctggtggcggaggctcaggcggtggcggatctcaagttcatctgacacagagcggccctgaagtgcggaagcctggcacaagcgtgaaggtgtcctgtaaagcccctggcaacaccctgaaaacctacgacctgcactgggtccgatctgtgcctggacagggactgcaatggatgggctggattagccacgagggcgacaagaaagtgatcgtggaacggttcaaggccaaagtgaccatcgactgggacagaagcaccaacaccgcctacctgcagctgagcggactgacatctggcgataccgccgtgtactactgtgccaagggcagcaagcaccggctgagagattacgccctgtacgacgatgacggcgccctgaattgggccgtcgatgtggactacctgagcaacctggaattctggggccagggaacagccgtgacagtgtcttccggcggaggtggaagtggtggtggcggtagcggaggcggtgggtccggaggtggtggatctgaacctaagagcagcgacaagacccacacctgtcctccatgtcctgctccagaactgctggccggaccttccgtgttcctgtttcctccaaagcctaaggacaccctgatgatcagcagaacccctgaagtgacctgcgtggtggtggatgtgtctcacgaggaccccgaagtgaagttcaattggtacgtggacggcgtggaagtgcacaatgccaagaccaagcctagagaggaacagtacaacagcacctacagagtggtgtccgtgctgaccgtgctgcaccaggattggctgaacggcaaagagtacaagtgcaaggtgtccaacaaggccctgcctctgcctgaggaaaagaccatcagcaaggccaagggccagcctcgcgaacctcaagtctgtacactgcctcctagccgcgacgaactgaccaagaaccaggtgtccctgagctgcgccgtgaagggcttttacccttccgatatcgccgtggaatgggagagcaatggccagcctgagaacaactacaagacaacccctcctgtgctggacagcgacggctcattcttcctggtgtccaagctgacagtggacaagagcagatggcagcagggcaacgtgttcagctgcagcgtgctgcatgaagccctgcacagccactacacccagaagtccctgtctctgagccccggcaagtgataaggatccgatctggtactgcatgcacgcaatgctagctgcccctttcccgtcctgggtaccccgagtctcccccgacctcgggtcccaggtatgctcccacctccacctgccccactcaccacctctgctagttccagacacctcccaagcacgcagcaatgcagctcaaaacgcttagcctagccacacccccacgggaaacagcagtgattaacctttagcaataaacgaaagtttaactaagctatactaaccccagggttggtcaatttcgtgccagccacaccctcgagctagcaaaaaaaaaaaaaaaaaaaaaaaaaaaaaagcatatgactaaaaaaaaaaaaaaaaaaaaaaaaaaaaaaaaaaaaaaaaaaaaaaaaaaaaaaaaaaaaaaaaaaaaaa

SEQ ID NO: 1087 - RNA, 2099 nt, synthetic construct
  source 1..2099: mol_type = other RNA
agaataaactagtattcttctggtccccacagactcagagagaacccgccaccatggattggatctggcgcatcctgtttctcgtgggagctgccacaggcgcccactctgattttgtgctgacacagtctccccacagcctgagcgttacacctggcgagtctgccagcatcagctgcaagtctagccactctctgatccacggcgaccggaacaactacctggcttggtacgtgcagaagcccggcagatctcctcagctgctgatctacctggccagcagcagagcttctggcgtgcccgatagattttctggcagcggcagcgacaaggacttcaccctgaagatctccagagtggaaaccgaggacgtgggcacctactactgtatgcagggcagagagagcccctggacatttggccagggcaccaaggtggacatcaaaggcggcggaggaagcggaggcggaggttctggtggcggaggctcaggcggtggcggatctcaagttcatctgacacagagcggccctgaagtgcggaagcctggcacaagcgtgaaggtgtcctgtaaagcccctggcaacaccctgaaaacctacgacctgcactgggtccgatctgtgcctggacagggactgcaatggatgggctggattagccacgagggcgacaagaaagtgatcgtggaacggttcaaggccaaagtgaccatcgactgggacagaagcaccaacaccgcctacctgcagctgagcggactgacatctggcgataccgccgtgtactactgtgccaagggcagcaagcaccggctgagagattacgccctgtacgacgatgacggcgccctgaattgggccgtcgatgtggactacctgagcaacctggaattctggggccagggaacagccgtgacagtgtcttccggcggaggtggaagtggtggtggcggtagcggaggcggtgggtccggaggtggtggatctgaacctaagagcagcgacaagacccacacctgtcctccatgtcctgctccagaactgctggccggaccttccgtgttcctgtttcctccaaagcctaaggacaccctgatgatcagcagaacccctgaagtgacctgcgtggtggtggatgtgtctcacgaggaccctgaagtgaagttcaattggtacgtggacggcgtggaagtgcacaacgccaagaccaagcctagagaggaacagtacaacagcacctacagagtggtgtccgtgctgaccgtgctgcaccaggattggctgaacggcaaagagtacaagtgcaaggtgtccaacaaggccctgcctgcccctgaggaaaagaccatcagcaaggccaagggccagcctcgcgaacctcaagtctgtacactgcctcctagccgcgacgaactgaccaagaaccaggtgtccctgagctgcgccgtgaagggcttttacccttccgatatcgccgtggaatgggagagcaatggccagcctgagaacaactacaagacaacccctcctgtgctggacagcgacggctcattcttcctggtgtccaagctgacagtggacaagagcagatggcagcagggcaacgtgttcagctgcagcgtgctgcatgaagccctgcacagccactacacccagaagtccctgtctctgagccccggcaagtgataaggatccgatctggtactgcatgcacgcaatgctagctgcccctttcccgtcctgggtaccccgagtctcccccgacctcgggtcccaggtatgctcccacctccacctgccccactcaccacctctgctagttccagacacctcccaagcacgcagcaatgcagctcaaaacgcttagcctagccacacccccacgggaaacagcagtgattaacctttagcaataaacgaaagtttaactaagctatactaaccccagggttggtcaatttcgtgccagccacaccctcgagctagcaaaaaaaaaaaaaaaaaaaaaaaaaaaaaagcatatgactaaaaaaaaaaaaaaaaaaaaaaaaaaaaaaaaaaaaaaaaaaaaaaaaaaaaaaaaaaaaaaaaaaaaaa

SEQ ID NO: 1088 - RNA, 2099 nt, synthetic construct
  source 1..2099: mol_type = other RNA
agaataaactagtattcttctggtccccacagactcagagagaacccgccaccatggattggatctggcgcatcctgtttctcgtgggagctgccacaggcgcccactctgattttgtgctgacacagtctccccacagcctgagcgttacacctggcgagtctgccagcatcagctgcaagtctagccactctctgatccacggcgaccggaacaactacctggcttggtacgtgcagaagcccggcagatctcctcagctgctgatctacctggccagcagcagagcttctggcgtgcccgatagattttctggcagcggcagcgacaaggacttcaccctgaagatctccagagtggaaaccgaggacgtgggcacctactactgtatgcagggcagagagagcccctggacatttggccagggcaccaaggtggacatcaaaggcggcggaggaagcggaggcggaggttctggtggcggaggctcaggcggtggcggatctcaagttcatctgacacagagcggccctgaagtgcggaagcctggcacaagcgtgaaggtgtcctgtaaagcccctggcaacaccctgaaaacctacgacctgcactgggtccgatctgtgcctggacagggactgcaatggatgggctggattagccacgagggcgacaagaaagtgatcgtggaacggttcaaggccaaagtgaccatcgactgggacagaagcaccaacaccgcctacctgcagctgagcggactgacatctggcgataccgccgtgtactactgtgccaagggcagcaagcaccggctgagagattacgccctgtacgacgatgacggcgccctgaattgggccgtcgatgtggactacctgagcaacctggaattctggggccagggaacagccgtgacagtgtcttccggcggaggtggaagtggtggtggcggtagcggaggcggtgggtccggaggtggtggatctgaacctaagagcagcgacaagacccacacctgtcctccatgtcctgctccagaactgctggccggaccttccgtgttcctgtttcctccaaagcctaaggacaccctgatgatcagcagaacccctgaagtgacctgcgtggtggtggatgtgtctcacgaggaccctgaagtgaagttcaattggtacgtggacggcgtggaagtgcacaacgccaagaccaagcctagagaggaacagtacaacagcacctacagagtggtgtccgtgctgaccgtgctgcaccaggattggctgaacggcaaagagtacaagtgcaaggtgtccaacaaggccctgcctgcccctatcgaaaagaccatcagcaaggccaagggccagcctcgcgaacctcaagtctgtacactgcctcctagccgcgacgaactgaccaagaaccaggtgtccctgagctgcgccgtgaagggcttttacccttccgatatcgccgtggaatgggagagcaatggccagcctgagaacaactacaagacaacccctcctgtgctggacagcgacggctcattcttcctggtgtccaagctgacagtggacaagagcagatggcagcagggcaacgtgttcagctgcagcgtgctgcatgaagccctgcacagccactacacccagaagtccctgtctctgagccccggcaagtgataaggatccgatctggtactgcatgcacgcaatgctagctgcccctttcccgtcctgggtaccccgagtctcccccgacctcgggtcccaggtatgctcccacctccacctgccccactcaccacctctgctagttccagacacctcccaagcacgcagcaatgcagctcaaaacgcttagcctagccacacccccacgggaaacagcagtgattaacctttagcaataaacgaaagtttaactaagctatactaaccccagggttggtcaatttcgtgccagccacaccctcgagctagcaaaaaaaaaaaaaaaaaaaaaaaaaaaaaagcatatgactaaaaaaaaaaaaaaaaaaaaaaaaaaaaaaaaaaaaaaaaaaaaaaaaaaaaaaaaaaaaaaaaaaaaaa

SEQ ID NO: 1089 - RNA, 2099 nt, synthetic construct
  source 1..2099: mol_type = other RNA
agaataaactagtattcttctggtccccacagactcagagagaacccgccaccatggattggatctggcgcatcctgtttctcgtgggagctgccacaggcgcccactctgattttgtgctgacacagtctccccacagcctgagcgttacacctggcgagtctgccagcatcagctgcaagtctagccactctctgatccacggcgaccggaacaactacctggcttggtacgtgcagaagcccggcagatctcctcagctgctgatctacctggccagcagcagagcttctggcgtgcccgatagattttctggcagcggcagcgacaaggacttcaccctgaagatctccagagtggaaaccgaggacgtgggcacctactactgtatgcagggcagagagagcccctggacatttggccagggcaccaaggtggacatcaaaggcggcggaggaagcggaggcggaggttctggtggcggaggctcaggcggtggcggatctcaagttcatctgacacagagcggccctgaagtgcggaagcctggcacaagcgtgaaggtgtcctgtaaagcccctggcaacaccctgaaaacctacgacctgcactgggtccgatctgtgcctggacagggactgcaatggatgggctggattagccacgagggcgacaagaaagtgatcgtggaacggttcaaggccaaagtgaccatcgactgggacagaagcaccaacaccgcctacctgcagctgagcggactgacatctggcgataccgccgtgtactactgtgccaagggcagcaagcaccggctgagagattacgccctgtacgacgatgacggcgccctgaattgggccgtcgatgtggactacctgagcaacctggaattctggggccagggaacagccgtgacagtgtcttccggcggaggtggaagtggtggtggcggtagcggaggcggtgggtccggaggtggtggatctgaacctaagagcagcgacaagacccacacctgtcctccatgtcctgctccagaactgctgggcggaccttccgtgttcctgtttcctccaaagcctaaggacaccctgatgatcagcagaacccctgaagtgacctgcgtggtggtggatgtgtctcacgaggaccctgaagtgaagttcaattggtacgtggacggcgtggaagtgcacaacgccaagaccaagcctagagaggaacagtacaacagcacctacagagtggtgtccgtgctgaccgtgctgcaccaggattggctgaacggcaaagagtacaagtgcaaggtgtccaacaaggccctgcctgcccctgaggaaaagaccatcagcaaggccaagggccagcctcgcgaacctcaagtctgtacactgcctcctagccgcgacgaactgaccaagaaccaggtgtccctgagctgcgccgtgaagggcttttacccttccgatatcgccgtggaatgggagagcaatggccagcctgagaacaactacaagacaacccctcctgtgctggacagcgacggctcattcttcctggtgtccaagctgacagtggacaagagcagatggcagcagggcaacgtgttcagctgcagcgtgctgcatgaagccctgcacagccactacacccagaagtccctgtctctgagccccggcaagtgataaggatccgatctggtactgcatgcacgcaatgctagctgcccctttcccgtcctgggtaccccgagtctcccccgacctcgggtcccaggtatgctcccacctccacctgccccactcaccacctctgctagttccagacacctcccaagcacgcagcaatgcagctcaaaacgcttagcctagccacacccccacgggaaacagcagtgattaacctttagcaataaacgaaagtttaactaagctatactaaccccagggttggtcaatttcgtgccagccacaccctcgagctagcaaaaaaaaaaaaaaaaaaaaaaaaaaaaaagcatatgactaaaaaaaaaaaaaaaaaaaaaaaaaaaaaaaaaaaaaaaaaaaaaaaaaaaaaaaaaaaaaaaaaaaaaa

SEQ ID NO: 1090 - RNA, 2099 nt, synthetic construct
  source 1..2099: mol_type = other RNA
agaataaactagtattcttctggtccccacagactcagagagaacccgccaccatggattggatctggcgcatcctgtttctcgtgggagctgccacaggcgcccactctgattttgtgctgacacagtctccccacagcctgagcgttacacctggcgagtctgccagcatcagctgcaagtctagccactctctgatccacggcgaccggaacaactacctggcttggtacgtgcagaagcccggcagatctcctcagctgctgatctacctggccagcagcagagcttctggcgtgcccgatagattttctggcagcggcagcgacaaggacttcaccctgaagatctccagagtggaaaccgaggacgtgggcacctactactgtatgcagggcagagagagcccctggacatttggccagggcaccaaggtggacatcaaaggcggcggaggaagcggaggcggaggttctggtggcggaggctcaggcggtggcggatctcaagttcatctgacacagagcggccctgaagtgcggaagcctggcacaagcgtgaaggtgtcctgtaaagcccctggcaacaccctgaaaacctacgacctgcactgggtccgatctgtgcctggacagggactgcaatggatgggctggattagccacgagggcgacaagaaagtgatcgtggaacggttcaaggccaaagtgaccatcgactgggacagaagcaccaacaccgcctacctgcagctgagcggactgacatctggcgataccgccgtgtactactgtgccaagggcagcaagcaccggctgagagattacgccctgtacgacgatgacggcgccctgaattgggccgtcgatgtggactacctgagcaacctggaattctggggccagggaacagccgtgacagtgtcttccggcggaggtggaagtggtggtggcggtagcggaggcggtgggtccggaggtggtggatctgaacctaagagcagcgacaagacccacacctgtcctccatgtcctgctccagaactgctcggcggaccttccgtgttcctgtttcctccaaagcctaaggacaccctgatgatcagcagaacccctgaagtgacctgcgtggtggtggatgtgtctcacgaggaccccgaagtgaagttcaattggtacgtggacggcgtggaagtgcacaacgccaagaccaagcctagagaggaacagtacaacagcacctacagagtggtgtccgtgctgacagtgctgcaccaggattggctgaacggcaaagagtacaagtgcaaggtgtccaacaaggccctgcctgctcctatcgagaaaaccatcagcaaggccaagggccagcctagggaaccccaggtttacaccctgcctccatgccgcgacgaactgaccaagaaccaggtgtccctgtggtgcctggtcaagggcttctacccttccgatatcgccgtggaatgggagagcaatggccagcctgagaacaactacaagacaacccctcctgtgctggacagcgacggctcattcttcctgtacagcaagctgacagtggacaagagcagatggcagcagggcaacgtgttcagctgcagcgtgctgcatgaagccctgcacagccactacacccagaagtccctgtctctgagccccggcaagtgataaggatccgatctggtactgcatgcacgcaatgctagctgcccctttcccgtcctgggtaccccgagtctcccccgacctcgggtcccaggtatgctcccacctccacctgccccactcaccacctctgctagttccagacacctcccaagcacgcagcaatgcagctcaaaacgcttagcctagccacacccccacgggaaacagcagtgattaacctttagcaataaacgaaagtttaactaagctatactaaccccagggttggtcaatttcgtgccagccacaccctcgagctagcaaaaaaaaaaaaaaaaaaaaaaaaaaaaaagcatatgactaaaaaaaaaaaaaaaaaaaaaaaaaaaaaaaaaaaaaaaaaaaaaaaaaaaaaaaaaaaaaaaaaaaaaa

SEQ ID NO: 1091 - RNA, 2099 nt, synthetic construct
  source 1..2099: mol_type = other RNA
agaataaactagtattcttctggtccccacagactcagagagaacccgccaccatggattggatctggcgcatcctgtttctcgtgggagctgccacaggcgcccactctgattttgtgctgacacagtctccccacagcctgagcgttacacctggcgagtctgccagcatcagctgcaagtctagccactctctgatccacggcgaccggaacaactacctggcttggtacgtgcagaagcccggcagatctcctcagctgctgatctacctggccagcagcagagcttctggcgtgcccgatagattttctggcagcggcagcgacaaggacttcaccctgaagatctccagagtggaaaccgaggacgtgggcacctactactgtatgcagggcagagagagcccctggacatttggccagggcaccaaggtggacatcaaaggcggcggaggaagcggaggcggaggttctggtggcggaggctcaggcggtggcggatctcaagttcatctgacacagagcggccctgaagtgcggaagcctggcacaagcgtgaaggtgtcctgtaaagcccctggcaacaccctgaaaacctacgacctgcactgggtccgatctgtgcctggacagggactgcaatggatgggctggattagccacgagggcgacaagaaagtgatcgtggaacggttcaaggccaaagtgaccatcgactgggacagaagcaccaacaccgcctacctgcagctgagcggactgacatctggcgataccgccgtgtactactgtgccaagggcagcaagcaccggctgagagattacgccctgtacgacgatgacggcgccctgaattgggccgtcgatgtggactacctgagcaacctggaattctggggccagggaacagccgtgacagtgtcttccggcggaggtggaagtggtggtggcggtagcggaggcggtgggtccggaggtggtggatctgaacctaagagcagcgacaagacccacacctgtcctccatgtcctgctccagaactgctggccggaccttccgtgttcctgtttcctccaaagcctaaggacaccctgatgatcagcagaacccctgaagtgacctgcgtggtggtggatgtgtctcacgaggaccccgaagtgaagttcaattggtacgtggacggcgtggaagtgcacaatgccaagaccaagcctagagaggaacagtacaacagcacctacagagtggtgtccgtgctgaccgtgctgcaccaggattggctgaacggcaaagagtacaagtgcaaggtgtccaacaaggccctgcctctgcctgaggaaaagaccatcagcaaggccaagggccagcctagggaaccccaggtttacaccctgcctccatgccgcgacgaactgaccaagaaccaggtgtccctgtggtgcctggtcaagggcttctacccttccgatatcgccgtggaatgggagagcaatggccagcctgagaacaactacaagacaacccctcctgtgctggacagcgacggctcattcttcctgtacagcaagctgacagtggacaagagcagatggcagcagggcaacgtgttcagctgcagcgtgctgcatgaagccctgcacagccactacacccagaagtccctgtctctgagccccggcaagtgataaggatccgatctggtactgcatgcacgcaatgctagctgcccctttcccgtcctgggtaccccgagtctcccccgacctcgggtcccaggtatgctcccacctccacctgccccactcaccacctctgctagttccagacacctcccaagcacgcagcaatgcagctcaaaacgcttagcctagccacacccccacgggaaacagcagtgattaacctttagcaataaacgaaagtttaactaagctatactaaccccagggttggtcaatttcgtgccagccacaccctcgagctagcaaaaaaaaaaaaaaaaaaaaaaaaaaaaaagcatatgactaaaaaaaaaaaaaaaaaaaaaaaaaaaaaaaaaaaaaaaaaaaaaaaaaaaaaaaaaaaaaaaaaaaaaa

SEQ ID NO: 1092 - RNA, 2099 nt, synthetic construct
  source 1..2099: mol_type = other RNA
agaataaactagtattcttctggtccccacagactcagagagaacccgccaccatggattggatctggcgcatcctgtttctcgtgggagctgccacaggcgcccactctgattttgtgctgacacagtctccccacagcctgagcgttacacctggcgagtctgccagcatcagctgcaagtctagccactctctgatccacggcgaccggaacaactacctggcttggtacgtgcagaagcccggcagatctcctcagctgctgatctacctggccagcagcagagcttctggcgtgcccgatagattttctggcagcggcagcgacaaggacttcaccctgaagatctccagagtggaaaccgaggacgtgggcacctactactgtatgcagggcagagagagcccctggacatttggccagggcaccaaggtggacatcaaaggcggcggaggaagcggaggcggaggttctggtggcggaggctcaggcggtggcggatctcaagttcatctgacacagagcggccctgaagtgcggaagcctggcacaagcgtgaaggtgtcctgtaaagcccctggcaacaccctgaaaacctacgacctgcactgggtccgatctgtgcctggacagggactgcaatggatgggctggattagccacgagggcgacaagaaagtgatcgtggaacggttcaaggccaaagtgaccatcgactgggacagaagcaccaacaccgcctacctgcagctgagcggactgacatctggcgataccgccgtgtactactgtgccaagggcagcaagcaccggctgagagattacgccctgtacgacgatgacggcgccctgaattgggccgtcgatgtggactacctgagcaacctggaattctggggccagggaacagccgtgacagtgtcttccggcggaggtggaagtggtggtggcggtagcggaggcggtgggtccggaggtggtggatctgaacctaagagcagcgacaagacccacacctgtcctccatgtcctgctccagaactgctggccggaccttccgtgttcctgtttcctccaaagcctaaggacaccctgatgatcagcagaacccctgaagtgacctgcgtggtggtggatgtgtctcacgaggaccctgaagtgaagttcaattggtacgtggacggcgtggaagtgcacaacgccaagaccaagcctagagaggaacagtacaacagcacctacagagtggtgtccgtgctgaccgtgctgcaccaggattggctgaacggcaaagagtacaagtgcaaggtgtccaacaaggccctgcctgcccctgaggaaaagaccatcagcaaggccaagggccagcctagggaaccccaggtttacaccctgcctccatgccgcgacgaactgaccaagaaccaggtgtccctgtggtgcctggtcaagggcttctacccttccgatatcgccgtggaatgggagagcaatggccagcctgagaacaactacaagacaacccctcctgtgctggacagcgacggctcattcttcctgtacagcaagctgacagtggacaagagcagatggcagcagggcaacgtgttcagctgcagcgtgctgcatgaagccctgcacagccactacacccagaagtccctgtctctgagccccggcaagtgataaggatccgatctggtactgcatgcacgcaatgctagctgcccctttcccgtcctgggtaccccgagtctcccccgacctcgggtcccaggtatgctcccacctccacctgccccactcaccacctctgctagttccagacacctcccaagcacgcagcaatgcagctcaaaacgcttagcctagccacacccccacgggaaacagcagtgattaacctttagcaataaacgaaagtttaactaagctatactaaccccagggttggtcaatttcgtgccagccacaccctcgagctagcaaaaaaaaaaaaaaaaaaaaaaaaaaaaaagcatatgactaaaaaaaaaaaaaaaaaaaaaaaaaaaaaaaaaaaaaaaaaaaaaaaaaaaaaaaaaaaaaaaaaaaaaa

SEQ ID NO: 1093 - RNA, 2099 nt, synthetic construct
  source 1..2099: mol_type = other RNA
agaataaactagtattcttctggtccccacagactcagagagaacccgccaccatggattggatctggcgcatcctgtttctcgtgggagctgccacaggcgcccactctgattttgtgctgacacagtctccccacagcctgagcgttacacctggcgagtctgccagcatcagctgcaagtctagccactctctgatccacggcgaccggaacaactacctggcttggtacgtgcagaagcccggcagatctcctcagctgctgatctacctggccagcagcagagcttctggcgtgcccgatagattttctggcagcggcagcgacaaggacttcaccctgaagatctccagagtggaaaccgaggacgtgggcacctactactgtatgcagggcagagagagcccctggacatttggccagggcaccaaggtggacatcaaaggcggcggaggaagcggaggcggaggttctggtggcggaggctcaggcggtggcggatctcaagttcatctgacacagagcggccctgaagtgcggaagcctggcacaagcgtgaaggtgtcctgtaaagcccctggcaacaccctgaaaacctacgacctgcactgggtccgatctgtgcctggacagggactgcaatggatgggctggattagccacgagggcgacaagaaagtgatcgtggaacggttcaaggccaaagtgaccatcgactgggacagaagcaccaacaccgcctacctgcagctgagcggactgacatctggcgataccgccgtgtactactgtgccaagggcagcaagcaccggctgagagattacgccctgtacgacgatgacggcgccctgaattgggccgtcgatgtggactacctgagcaacctggaattctggggccagggaacagccgtgacagtgtcttccggcggaggtggaagtggtggtggcggtagcggaggcggtgggtccggaggtggtggatctgaacctaagagcagcgacaagacccacacctgtcctccatgtcctgctccagaactgctggccggaccttccgtgttcctgtttcctccaaagcctaaggacaccctgatgatcagcagaacccctgaagtgacctgcgtggtggtggatgtgtctcacgaggaccctgaagtgaagttcaattggtacgtggacggcgtggaagtgcacaacgccaagaccaagcctagagaggaacagtacaacagcacctacagagtggtgtccgtgctgaccgtgctgcaccaggattggctgaacggcaaagagtacaagtgcaaggtgtccaacaaggccctgcctgcccctatcgaaaagaccatcagcaaggccaagggccagcctagggaaccccaggtttacaccctgcctccatgccgcgacgaactgaccaagaaccaggtgtccctgtggtgcctggtcaagggcttctacccttccgatatcgccgtggaatgggagagcaatggccagcctgagaacaactacaagacaacccctcctgtgctggacagcgacggctcattcttcctgtacagcaagctgacagtggacaagagcagatggcagcagggcaacgtgttcagctgcagcgtgctgcatgaagccctgcacagccactacacccagaagtccctgtctctgagccccggcaagtgataaggatccgatctggtactgcatgcacgcaatgctagctgcccctttcccgtcctgggtaccccgagtctcccccgacctcgggtcccaggtatgctcccacctccacctgccccactcaccacctctgctagttccagacacctcccaagcacgcagcaatgcagctcaaaacgcttagcctagccacacccccacgggaaacagcagtgattaacctttagcaataaacgaaagtttaactaagctatactaaccccagggttggtcaatttcgtgccagccacaccctcgagctagcaaaaaaaaaaaaaaaaaaaaaaaaaaaaaagcatatgactaaaaaaaaaaaaaaaaaaaaaaaaaaaaaaaaaaaaaaaaaaaaaaaaaaaaaaaaaaaaaaaaaaaaaa

SEQ ID NO: 1094 - RNA, 2099 nt, synthetic construct
  source 1..2099: mol_type = other RNA
agaataaactagtattcttctggtccccacagactcagagagaacccgccaccatggattggatctggcgcatcctgtttctcgtgggagctgccacaggcgcccactctgattttgtgctgacacagtctccccacagcctgagcgttacacctggcgagtctgccagcatcagctgcaagtctagccactctctgatccacggcgaccggaacaactacctggcttggtacgtgcagaagcccggcagatctcctcagctgctgatctacctggccagcagcagagcttctggcgtgcccgatagattttctggcagcggcagcgacaaggacttcaccctgaagatctccagagtggaaaccgaggacgtgggcacctactactgtatgcagggcagagagagcccctggacatttggccagggcaccaaggtggacatcaaaggcggcggaggaagcggaggcggaggttctggtggcggaggctcaggcggtggcggatctcaagttcatctgacacagagcggccctgaagtgcggaagcctggcacaagcgtgaaggtgtcctgtaaagcccctggcaacaccctgaaaacctacgacctgcactgggtccgatctgtgcctggacagggactgcaatggatgggctggattagccacgagggcgacaagaaagtgatcgtggaacggttcaaggccaaagtgaccatcgactgggacagaagcaccaacaccgcctacctgcagctgagcggactgacatctggcgataccgccgtgtactactgtgccaagggcagcaagcaccggctgagagattacgccctgtacgacgatgacggcgccctgaattgggccgtcgatgtggactacctgagcaacctggaattctggggccagggaacagccgtgacagtgtcttccggcggaggtggaagtggtggtggcggtagcggaggcggtgggtccggaggtggtggatctgaacctaagagcagcgacaagacccacacctgtcctccatgtcctgctccagaactgctgggcggaccttccgtgttcctgtttcctccaaagcctaaggacaccctgatgatcagcagaacccctgaagtgacctgcgtggtggtggatgtgtctcacgaggaccctgaagtgaagttcaattggtacgtggacggcgtggaagtgcacaacgccaagaccaagcctagagaggaacagtacaacagcacctacagagtggtgtccgtgctgaccgtgctgcaccaggattggctgaacggcaaagagtacaagtgcaaggtgtccaacaaggccctgcctgcccctgaggaaaagaccatcagcaaggccaagggccagcctagggaaccccaggtttacaccctgcctccatgccgcgacgaactgaccaagaaccaggtgtccctgtggtgcctggtcaagggcttctacccttccgatatcgccgtggaatgggagagcaatggccagcctgagaacaactacaagacaacccctcctgtgctggacagcgacggctcattcttcctgtacagcaagctgacagtggacaagagcagatggcagcagggcaacgtgttcagctgcagcgtgctgcatgaagccctgcacagccactacacccagaagtccctgtctctgagccccggcaagtgataaggatccgatctggtactgcatgcacgcaatgctagctgcccctttcccgtcctgggtaccccgagtctcccccgacctcgggtcccaggtatgctcccacctccacctgccccactcaccacctctgctagttccagacacctcccaagcacgcagcaatgcagctcaaaacgcttagcctagccacacccccacgggaaacagcagtgattaacctttagcaataaacgaaagtttaactaagctatactaaccccagggttggtcaatttcgtgccagccacaccctcgagctagcaaaaaaaaaaaaaaaaaaaaaaaaaaaaaagcatatgactaaaaaaaaaaaaaaaaaaaaaaaaaaaaaaaaaaaaaaaaaaaaaaaaaaaaaaaaaaaaaaaaaaaaaa

SEQ ID NO: 1095 - RNA, 2114 nt, synthetic construct
  source 1..2114: mol_type = other RNA
agaataaactagtattcttctggtccccacagactcagagagaacccgccaccatggattggatctggcgcatcctgtttctcgtgggagctgccacaggcgcccactctcaagttcacctgacacagtctggccccgaagtgcggaagcctggcacaagcgtgaaggtgtcctgtaaagcccctggcaacaccctgaaaacctacgacctgcactgggtccgatctgtgcctggacaaggactgcagtggatgggctggattagccacgagggcgacaagaaagtgatcgtggaacggttcaaggccaaagtgaccatcgactgggacagaagcaccaacaccgcctacctgcagctgagcggactgacatctggcgataccgccgtgtactactgtgccaagggcagcaagcaccggctgagagattacgccctgtacgacgatgacggcgccctgaattgggccgtcgatgtggactacctgagcaacctggaattctggggccagggaacagccgtgacagtgtcttccggcggcggaggaagcggagggggaggctctggaggtggtggctctggtggcggaggctcaggcggtggcggatctgattttgtgctgacacagagccctcacagcctgagcgttacacctggcgagagcgccagcatcagctgcaagtctagccactctctgatccacggcgaccggaacaactacctggcttggtacgtgcagaagcccggcagatctcctcagctgctgatctacctggccagcagcagagctagcggcgtgccagatagattttctggcagcggcagcgacaaggatttcaccctgaagatctccagagtggaaaccgaggacgtgggcacctactactgtatgcagggcagagagagcccctggacatttggccagggcaccaaggtggacatcaaaggcggaggtggaagtggtggtggcggtagcggaggcggtgggtccggaggtggtggatctgaacctaagagcagcgacaagacccacacctgtcctccatgtcctgctccagaactgctcggcggaccttccgtgttcctgtttcctccaaagcctaaggacaccctgatgatcagcagaacccctgaagtgacctgcgtggtggtggatgtgtctcacgaggaccccgaagtgaagttcaattggtacgtggacggcgtggaagtgcacaacgccaagaccaagcctagagaggaacagtacaacagcacctacagagtggtgtccgtgctgacagtgctgcaccaggattggctgaacggcaaagagtacaagtgcaaggtgtccaacaaggccctgcctgctcctatcgagaaaaccatcagcaaggccaagggccagcctagggaaccccaggtttacacactgcctccaagccgcgaggaaatgaccaagaaccaggtgtccctgacctgcctcgtgaagggcttctacccttccgatatcgccgtggaatgggagagcaatggccagcctgagaacaactacaagacaacccctcctgtgctggacagcgacggctcattcttcctgtacagcaagctgactgtggataagtcccggtggcagcagggcaacgtgttcagctgttctgtgatgcacgaagccctgcacaaccactacacccagaaaagcctgtctctgagccccggcaagtgataaggatccgatctggtactgcatgcacgcaatgctagctgcccctttcccgtcctgggtaccccgagtctcccccgacctcgggtcccaggtatgctcccacctccacctgccccactcaccacctctgctagttccagacacctcccaagcacgcagcaatgcagctcaaaacgcttagcctagccacacccccacgggaaacagcagtgattaacctttagcaataaacgaaagtttaactaagctatactaaccccagggttggtcaatttcgtgccagccacaccctcgagctagcaaaaaaaaaaaaaaaaaaaaaaaaaaaaaagcatatgactaaaaaaaaaaaaaaaaaaaaaaaaaaaaaaaaaaaaaaaaaaaaaaaaaaaaaaaaaaaaaaaaaaaaaa

SEQ ID NO: 1096 - RNA, 2114 nt, synthetic construct
  source 1..2114: mol_type = other RNA
agaataaactagtattcttctggtccccacagactcagagagaacccgccaccatggattggatctggcgcatcctgtttctcgtgggagctgccacaggcgcccactctcaagttcacctgacacagtctggccccgaagtgcggaagcctggcacaagcgtgaaggtgtcctgtaaagcccctggcaacaccctgaaaacctacgacctgcactgggtccgatctgtgcctggacaaggactgcagtggatgggctggattagccacgagggcgacaagaaagtgatcgtggaacggttcaaggccaaagtgaccatcgactgggacagaagcaccaacaccgcctacctgcagctgagcggactgacatctggcgataccgccgtgtactactgtgccaagggcagcaagcaccggctgagagattacgccctgtacgacgatgacggcgccctgaattgggccgtcgatgtggactacctgagcaacctggaattctggggccagggaacagccgtgacagtgtcttccggcggcggaggaagcggagggggaggctctggaggtggtggctctggtggcggaggctcaggcggtggcggatctgattttgtgctgacacagagccctcacagcctgagcgttacacctggcgagagcgccagcatcagctgcaagtctagccactctctgatccacggcgaccggaacaactacctggcttggtacgtgcagaagcccggcagatctcctcagctgctgatctacctggccagcagcagagctagcggcgtgccagatagattttctggcagcggcagcgacaaggatttcaccctgaagatctccagagtggaaaccgaggacgtgggcacctactactgtatgcagggcagagagagcccctggacatttggccagggcaccaaggtggacatcaaaggcggaggtggaagtggtggtggcggtagcggaggcggtgggtccggaggtggtggatctgaacctaagagcagcgacaagacccacacctgtcctccatgtcctgctccagaactgctcggcggaccttccgtgttcctgtttcctccaaagcctaaggacaccctgatgatcagcagaacccctgaagtgacctgcgtggtggtggatgtgtctcacgaggaccccgaagtgaagttcaattggtacgtggacggcgtggaagtgcacaacgccaagaccaagcctagagaggaacagtacaacagcacctacagagtggtgtccgtgctgacagtgctgcaccaggattggctgaacggcaaagagtacaagtgcaaggtgtccaacaaggccctgcctgctcctatcgagaaaaccatcagcaaggccaagggccagcctagggaaccccaggtttacacactgcctccaagccgcgaggaaatgaccaagaaccaggtgtccctgacctgcctcgtgaagggcttctacccttccgatatcgccgtggaatgggagagcaatggccagcctgagaacaactacaagacaacccctcctgtgctggacagcgacggctcattcttcctgtacagcaagctgaccgtggacaagtccagatggcagcagggcaacgtgttcagctgtagcgtgctgcacgaagccctgcacagccactacacccagaaaagcctgtctctgagccccggcaaatgataaggatccgatctggtactgcatgcacgcaatgctagctgcccctttcccgtcctgggtaccccgagtctcccccgacctcgggtcccaggtatgctcccacctccacctgccccactcaccacctctgctagttccagacacctcccaagcacgcagcaatgcagctcaaaacgcttagcctagccacacccccacgggaaacagcagtgattaacctttagcaataaacgaaagtttaactaagctatactaaccccagggttggtcaatttcgtgccagccacaccctcgagctagcaaaaaaaaaaaaaaaaaaaaaaaaaaaaaagcatatgactaaaaaaaaaaaaaaaaaaaaaaaaaaaaaaaaaaaaaaaaaaaaaaaaaaaaaaaaaaaaaaaaaaaaaa

SEQ ID NO: 1097 - RNA, 2114 nt, synthetic construct
  source 1..2114: mol_type = other RNA
agaataaactagtattcttctggtccccacagactcagagagaacccgccaccatggattggatctggcgcatcctgtttctcgtgggagctgccacaggcgcccactctcaagttcacctgacacagtctggccccgaagtgcggaagcctggcacaagcgtgaaggtgtcctgtaaagcccctggcaacaccctgaaaacctacgacctgcactgggtccgatctgtgcctggacaaggactgcagtggatgggctggattagccacgagggcgacaagaaagtgatcgtggaacggttcaaggccaaagtgaccatcgactgggacagaagcaccaacaccgcctacctgcagctgagcggactgacatctggcgataccgccgtgtactactgtgccaagggcagcaagcaccggctgagagattacgccctgtacgacgatgacggcgccctgaattgggccgtcgatgtggactacctgagcaacctggaattctggggccagggaacagccgtgacagtgtcttccggcggcggaggaagcggagggggaggctctggaggtggtggctctggtggcggaggctcaggcggtggcggatctgattttgtgctgacacagagccctcacagcctgagcgttacacctggcgagagcgccagcatcagctgcaagtctagccactctctgatccacggcgaccggaacaactacctggcttggtacgtgcagaagcccggcagatctcctcagctgctgatctacctggccagcagcagagctagcggcgtgccagatagattttctggcagcggcagcgacaaggatttcaccctgaagatctccagagtggaaaccgaggacgtgggcacctactactgtatgcagggcagagagagcccctggacatttggccagggcaccaaggtggacatcaaaggcggaggtggaagtggtggtggcggtagcggaggcggtgggtccggaggtggtggatctgaacctaagagcagcgacaagacccacacctgtcctccatgtcctgctccagaactgctggccggaccttccgtgttcctgtttcctccaaagcctaaggacaccctgatgatcagcagaacccctgaagtgacctgcgtggtggtggatgtgtctcacgaggaccccgaagtgaagttcaattggtacgtggacggcgtggaagtgcacaatgccaagaccaagcctagagaggaacagtacaacagcacctacagagtggtgtccgtgctgaccgtgctgcaccaggattggctgaacggcaaagagtacaagtgcaaggtgtccaacaaggccctgcctctgcctgaggaaaagaccatcagcaaggccaagggccagcctagggaaccccaggtttacacactgcctccaagccgcgaggaaatgaccaagaaccaggtgtccctgacctgcctcgtgaagggcttctacccttccgatatcgccgtggaatgggagagcaatggccagcctgagaacaactacaagacaacccctcctgtgctggacagcgacggctcattcttcctgtacagcaagctgaccgtggacaagtccagatggcagcagggcaacgtgttcagctgtagcgtgctgcacgaagccctgcacagccactacacccagaaaagcctgtctctgagccccggcaaatgataaggatccgatctggtactgcatgcacgcaatgctagctgcccctttcccgtcctgggtaccccgagtctcccccgacctcgggtcccaggtatgctcccacctccacctgccccactcaccacctctgctagttccagacacctcccaagcacgcagcaatgcagctcaaaacgcttagcctagccacacccccacgggaaacagcagtgattaacctttagcaataaacgaaagtttaactaagctatactaaccccagggttggtcaatttcgtgccagccacaccctcgagctagcaaaaaaaaaaaaaaaaaaaaaaaaaaaaaagcatatgactaaaaaaaaaaaaaaaaaaaaaaaaaaaaaaaaaaaaaaaaaaaaaaaaaaaaaaaaaaaaaaaaaaaaaa

SEQ ID NO: 1098 - RNA, 2114 nt, synthetic construct
  source 1..2114: mol_type = other RNA
agaataaactagtattcttctggtccccacagactcagagagaacccgccaccatggattggatctggcgcatcctgtttctcgtgggagctgccacaggcgcccactctcaagttcacctgacacagtctggccccgaagtgcggaagcctggcacaagcgtgaaggtgtcctgtaaagcccctggcaacaccctgaaaacctacgacctgcactgggtccgatctgtgcctggacaaggactgcagtggatgggctggattagccacgagggcgacaagaaagtgatcgtggaacggttcaaggccaaagtgaccatcgactgggacagaagcaccaacaccgcctacctgcagctgagcggactgacatctggcgataccgccgtgtactactgtgccaagggcagcaagcaccggctgagagattacgccctgtacgacgatgacggcgccctgaattgggccgtcgatgtggactacctgagcaacctggaattctggggccagggaacagccgtgacagtgtcttccggcggcggaggaagcggagggggaggctctggaggtggtggctctggtggcggaggctcaggcggtggcggatctgattttgtgctgacacagagccctcacagcctgagcgttacacctggcgagagcgccagcatcagctgcaagtctagccactctctgatccacggcgaccggaacaactacctggcttggtacgtgcagaagcccggcagatctcctcagctgctgatctacctggccagcagcagagctagcggcgtgccagatagattttctggcagcggcagcgacaaggatttcaccctgaagatctccagagtggaaaccgaggacgtgggcacctactactgtatgcagggcagagagagcccctggacatttggccagggcaccaaggtggacatcaaaggcggaggtggaagtggtggtggcggtagcggaggcggtgggtccggaggtggtggatctgaacctaagagcagcgacaagacccacacctgtcctccatgtcctgctccagaactgctggccggaccttccgtgttcctgtttcctccaaagcctaaggacaccctgatgatcagcagaacccctgaagtgacctgcgtggtggtggatgtgtctcacgaggaccctgaagtgaagttcaattggtacgtggacggcgtggaagtgcacaacgccaagaccaagcctagagaggaacagtacaacagcacctacagagtggtgtccgtgctgaccgtgctgcaccaggattggctgaacggcaaagagtacaagtgcaaggtgtccaacaaggccctgcctgcccctgaggaaaagaccatcagcaaggccaagggccagcctagggaaccccaggtttacacactgcctccaagccgcgaggaaatgaccaagaaccaggtgtccctgacctgcctcgtgaagggcttctacccttccgatatcgccgtggaatgggagagcaatggccagcctgagaacaactacaagacaacccctcctgtgctggacagcgacggctcattcttcctgtacagcaagctgaccgtggacaagtccagatggcagcagggcaacgtgttcagctgtagcgtgctgcacgaagccctgcacagccactacacccagaaaagcctgtctctgagccccggcaaatgataaggatccgatctggtactgcatgcacgcaatgctagctgcccctttcccgtcctgggtaccccgagtctcccccgacctcgggtcccaggtatgctcccacctccacctgccccactcaccacctctgctagttccagacacctcccaagcacgcagcaatgcagctcaaaacgcttagcctagccacacccccacgggaaacagcagtgattaacctttagcaataaacgaaagtttaactaagctatactaaccccagggttggtcaatttcgtgccagccacaccctcgagctagcaaaaaaaaaaaaaaaaaaaaaaaaaaaaaagcatatgactaaaaaaaaaaaaaaaaaaaaaaaaaaaaaaaaaaaaaaaaaaaaaaaaaaaaaaaaaaaaaaaaaaaaaa

SEQ ID NO: 1099 - RNA, 2114 nt, synthetic construct
  source 1..2114: mol_type = other RNA
agaataaactagtattcttctggtccccacagactcagagagaacccgccaccatggattggatctggcgcatcctgtttctcgtgggagctgccacaggcgcccactctcaagttcacctgacacagtctggccccgaagtgcggaagcctggcacaagcgtgaaggtgtcctgtaaagcccctggcaacaccctgaaaacctacgacctgcactgggtccgatctgtgcctggacaaggactgcagtggatgggctggattagccacgagggcgacaagaaagtgatcgtggaacggttcaaggccaaagtgaccatcgactgggacagaagcaccaacaccgcctacctgcagctgagcggactgacatctggcgataccgccgtgtactactgtgccaagggcagcaagcaccggctgagagattacgccctgtacgacgatgacggcgccctgaattgggccgtcgatgtggactacctgagcaacctggaattctggggccagggaacagccgtgacagtgtcttccggcggcggaggaagcggagggggaggctctggaggtggtggctctggtggcggaggctcaggcggtggcggatctgattttgtgctgacacagagccctcacagcctgagcgttacacctggcgagagcgccagcatcagctgcaagtctagccactctctgatccacggcgaccggaacaactacctggcttggtacgtgcagaagcccggcagatctcctcagctgctgatctacctggccagcagcagagctagcggcgtgccagatagattttctggcagcggcagcgacaaggatttcaccctgaagatctccagagtggaaaccgaggacgtgggcacctactactgtatgcagggcagagagagcccctggacatttggccagggcaccaaggtggacatcaaaggcggaggtggaagtggtggtggcggtagcggaggcggtgggtccggaggtggtggatctgaacctaagagcagcgacaagacccacacctgtcctccatgtcctgctccagaactgctggccggaccttccgtgttcctgtttcctccaaagcctaaggacaccctgatgatcagcagaacccctgaagtgacctgcgtggtggtggatgtgtctcacgaggaccctgaagtgaagttcaattggtacgtggacggcgtggaagtgcacaacgccaagaccaagcctagagaggaacagtacaacagcacctacagagtggtgtccgtgctgaccgtgctgcaccaggattggctgaacggcaaagagtacaagtgcaaggtgtccaacaaggccctgcctgcccctatcgaaaagaccatcagcaaggccaagggccagcctagggaaccccaggtttacacactgcctccaagccgcgaggaaatgaccaagaaccaggtgtccctgacctgcctcgtgaagggcttctacccttccgatatcgccgtggaatgggagagcaatggccagcctgagaacaactacaagacaacccctcctgtgctggacagcgacggctcattcttcctgtacagcaagctgaccgtggacaagtccagatggcagcagggcaacgtgttcagctgtagcgtgctgcacgaagccctgcacagccactacacccagaaaagcctgtctctgagccccggcaaatgataaggatccgatctggtactgcatgcacgcaatgctagctgcccctttcccgtcctgggtaccccgagtctcccccgacctcgggtcccaggtatgctcccacctccacctgccccactcaccacctctgctagttccagacacctcccaagcacgcagcaatgcagctcaaaacgcttagcctagccacacccccacgggaaacagcagtgattaacctttagcaataaacgaaagtttaactaagctatactaaccccagggttggtcaatttcgtgccagccacaccctcgagctagcaaaaaaaaaaaaaaaaaaaaaaaaaaaaaagcatatgactaaaaaaaaaaaaaaaaaaaaaaaaaaaaaaaaaaaaaaaaaaaaaaaaaaaaaaaaaaaaaaaaaaaaaa

SEQ ID NO: 1100 - RNA, 2114 nt, synthetic construct
  source 1..2114: mol_type = other RNA
agaataaactagtattcttctggtccccacagactcagagagaacccgccaccatggattggatctggcgcatcctgtttctcgtgggagctgccacaggcgcccactctcaagttcacctgacacagtctggccccgaagtgcggaagcctggcacaagcgtgaaggtgtcctgtaaagcccctggcaacaccctgaaaacctacgacctgcactgggtccgatctgtgcctggacaaggactgcagtggatgggctggattagccacgagggcgacaagaaagtgatcgtggaacggttcaaggccaaagtgaccatcgactgggacagaagcaccaacaccgcctacctgcagctgagcggactgacatctggcgataccgccgtgtactactgtgccaagggcagcaagcaccggctgagagattacgccctgtacgacgatgacggcgccctgaattgggccgtcgatgtggactacctgagcaacctggaattctggggccagggaacagccgtgacagtgtcttccggcggcggaggaagcggagggggaggctctggaggtggtggctctggtggcggaggctcaggcggtggcggatctgattttgtgctgacacagagccctcacagcctgagcgttacacctggcgagagcgccagcatcagctgcaagtctagccactctctgatccacggcgaccggaacaactacctggcttggtacgtgcagaagcccggcagatctcctcagctgctgatctacctggccagcagcagagctagcggcgtgccagatagattttctggcagcggcagcgacaaggatttcaccctgaagatctccagagtggaaaccgaggacgtgggcacctactactgtatgcagggcagagagagcccctggacatttggccagggcaccaaggtggacatcaaaggcggaggtggaagtggtggtggcggtagcggaggcggtgggtccggaggtggtggatctgaacctaagagcagcgacaagacccacacctgtcctccatgtcctgctccagaactgctgggcggaccttccgtgttcctgtttcctccaaagcctaaggacaccctgatgatcagcagaacccctgaagtgacctgcgtggtggtggatgtgtctcacgaggaccctgaagtgaagttcaattggtacgtggacggcgtggaagtgcacaacgccaagaccaagcctagagaggaacagtacaacagcacctacagagtggtgtccgtgctgaccgtgctgcaccaggattggctgaacggcaaagagtacaagtgcaaggtgtccaacaaggccctgcctgcccctgaggaaaagaccatcagcaaggccaagggccagcctagggaaccccaggtttacacactgcctccaagccgcgaggaaatgaccaagaaccaggtgtccctgacctgcctcgtgaagggcttctacccttccgatatcgccgtggaatgggagagcaatggccagcctgagaacaactacaagacaacccctcctgtgctggacagcgacggctcattcttcctgtacagcaagctgaccgtggacaagtccagatggcagcagggcaacgtgttcagctgtagcgtgctgcacgaagccctgcacagccactacacccagaaaagcctgtctctgagccccggcaaatgataaggatccgatctggtactgcatgcacgcaatgctagctgcccctttcccgtcctgggtaccccgagtctcccccgacctcgggtcccaggtatgctcccacctccacctgccccactcaccacctctgctagttccagacacctcccaagcacgcagcaatgcagctcaaaacgcttagcctagccacacccccacgggaaacagcagtgattaacctttagcaataaacgaaagtttaactaagctatactaaccccagggttggtcaatttcgtgccagccacaccctcgagctagcaaaaaaaaaaaaaaaaaaaaaaaaaaaaaagcatatgactaaaaaaaaaaaaaaaaaaaaaaaaaaaaaaaaaaaaaaaaaaaaaaaaaaaaaaaaaaaaaaaaaaaaaa

SEQ ID NO: 1101 - RNA, 2114 nt, synthetic construct
  source 1..2114: mol_type = other RNA
agaataaactagtattcttctggtccccacagactcagagagaacccgccaccatggattggatctggcgcatcctgtttctcgtgggagctgccacaggcgcccactctcaagttcacctgacacagtctggccccgaagtgcggaagcctggcacaagcgtgaaggtgtcctgtaaagcccctggcaacaccctgaaaacctacgacctgcactgggtccgatctgtgcctggacaaggactgcagtggatgggctggattagccacgagggcgacaagaaagtgatcgtggaacggttcaaggccaaagtgaccatcgactgggacagaagcaccaacaccgcctacctgcagctgagcggactgacatctggcgataccgccgtgtactactgtgccaagggcagcaagcaccggctgagagattacgccctgtacgacgatgacggcgccctgaattgggccgtcgatgtggactacctgagcaacctggaattctggggccagggaacagccgtgacagtgtcttccggcggcggaggaagcggagggggaggctctggaggtggtggctctggtggcggaggctcaggcggtggcggatctgattttgtgctgacacagagccctcacagcctgagcgttacacctggcgagagcgccagcatcagctgcaagtctagccactctctgatccacggcgaccggaacaactacctggcttggtacgtgcagaagcccggcagatctcctcagctgctgatctacctggccagcagcagagctagcggcgtgccagatagattttctggcagcggcagcgacaaggatttcaccctgaagatctccagagtggaaaccgaggacgtgggcacctactactgtatgcagggcagagagagcccctggacatttggccagggcaccaaggtggacatcaaaggcggaggtggaagtggtggtggcggtagcggaggcggtgggtccggaggtggtggatctgaacctaagagcagcgacaagacccacacctgtcctccatgtcctgctccagaactgctcggcggaccttccgtgttcctgtttcctccaaagcctaaggacaccctgatgatcagcagaacccctgaagtgacctgcgtggtggtggatgtgtctcacgaggaccccgaagtgaagttcaattggtacgtggacggcgtggaagtgcacaacgccaagaccaagcctagagaggaacagtacaacagcacctacagagtggtgtccgtgctgacagtgctgcaccaggattggctgaacggcaaagagtacaagtgcaaggtgtccaacaaggccctgcctgctcctatcgagaaaaccatcagcaaggccaagggccagcctagggaaccccaagtctgtacactgcctcctagccgcgaggaaatgaccaagaaccaggtgtccctgagctgcgccgtgaagggcttttacccttccgatatcgccgtggaatgggagagcaatggccagcctgagaacaactacaagacaacccctcctgtgctggacagcgacggctcattcttcctggtgtccaagctgacagtggacaagagcagatggcagcagggcaacgtgttcagctgctctgtgctgcacgaagccctgcacagccactacacccagaagtccctgtctctgagccccggcaagtgataaggatccgatctggtactgcatgcacgcaatgctagctgcccctttcccgtcctgggtaccccgagtctcccccgacctcgggtcccaggtatgctcccacctccacctgccccactcaccacctctgctagttccagacacctcccaagcacgcagcaatgcagctcaaaacgcttagcctagccacacccccacgggaaacagcagtgattaacctttagcaataaacgaaagtttaactaagctatactaaccccagggttggtcaatttcgtgccagccacaccctcgagctagcaaaaaaaaaaaaaaaaaaaaaaaaaaaaaagcatatgactaaaaaaaaaaaaaaaaaaaaaaaaaaaaaaaaaaaaaaaaaaaaaaaaaaaaaaaaaaaaaaaaaaaaaa

SEQ ID NO: 1102 - RNA, 2114 nt, synthetic construct
  source 1..2114: mol_type = other RNA
agaataaactagtattcttctggtccccacagactcagagagaacccgccaccatggattggatctggcgcatcctgtttctcgtgggagctgccacaggcgcccactctcaagttcacctgacacagtctggccccgaagtgcggaagcctggcacaagcgtgaaggtgtcctgtaaagcccctggcaacaccctgaaaacctacgacctgcactgggtccgatctgtgcctggacaaggactgcagtggatgggctggattagccacgagggcgacaagaaagtgatcgtggaacggttcaaggccaaagtgaccatcgactgggacagaagcaccaacaccgcctacctgcagctgagcggactgacatctggcgataccgccgtgtactactgtgccaagggcagcaagcaccggctgagagattacgccctgtacgacgatgacggcgccctgaattgggccgtcgatgtggactacctgagcaacctggaattctggggccagggaacagccgtgacagtgtcttccggcggcggaggaagcggagggggaggctctggaggtggtggctctggtggcggaggctcaggcggtggcggatctgattttgtgctgacacagagccctcacagcctgagcgttacacctggcgagagcgccagcatcagctgcaagtctagccactctctgatccacggcgaccggaacaactacctggcttggtacgtgcagaagcccggcagatctcctcagctgctgatctacctggccagcagcagagctagcggcgtgccagatagattttctggcagcggcagcgacaaggatttcaccctgaagatctccagagtggaaaccgaggacgtgggcacctactactgtatgcagggcagagagagcccctggacatttggccagggcaccaaggtggacatcaaaggcggaggtggaagtggtggtggcggtagcggaggcggtgggtccggaggtggtggatctgaacctaagagcagcgacaagacccacacctgtcctccatgtcctgctccagaactgctggccggaccttccgtgttcctgtttcctccaaagcctaaggacaccctgatgatcagcagaacccctgaagtgacctgcgtggtggtggatgtgtctcacgaggaccccgaagtgaagttcaattggtacgtggacggcgtggaagtgcacaatgccaagaccaagcctagagaggaacagtacaacagcacctacagagtggtgtccgtgctgaccgtgctgcaccaggattggctgaacggcaaagagtacaagtgcaaggtgtccaacaaggccctgcctctgcctgaggaaaagaccatcagcaaggccaagggccagcctagggaaccccaagtctgtacactgcctcctagccgcgaggaaatgaccaagaaccaggtgtccctgagctgcgccgtgaagggcttttacccttccgatatcgccgtggaatgggagagcaatggccagcctgagaacaactacaagacaacccctcctgtgctggacagcgacggctcattcttcctggtgtccaagctgacagtggacaagagcagatggcagcagggcaacgtgttcagctgctctgtgctgcacgaagccctgcacagccactacacccagaagtccctgtctctgagccccggcaagtgataaggatccgatctggtactgcatgcacgcaatgctagctgcccctttcccgtcctgggtaccccgagtctcccccgacctcgggtcccaggtatgctcccacctccacctgccccactcaccacctctgctagttccagacacctcccaagcacgcagcaatgcagctcaaaacgcttagcctagccacacccccacgggaaacagcagtgattaacctttagcaataaacgaaagtttaactaagctatactaaccccagggttggtcaatttcgtgccagccacaccctcgagctagcaaaaaaaaaaaaaaaaaaaaaaaaaaaaaagcatatgactaaaaaaaaaaaaaaaaaaaaaaaaaaaaaaaaaaaaaaaaaaaaaaaaaaaaaaaaaaaaaaaaaaaaaa

SEQ ID NO: 1103 - RNA, 2114 nt, synthetic construct
  source 1..2114: mol_type = other RNA
agaataaactagtattcttctggtccccacagactcagagagaacccgccaccatggattggatctggcgcatcctgtttctcgtgggagctgccacaggcgcccactctcaagttcacctgacacagtctggccccgaagtgcggaagcctggcacaagcgtgaaggtgtcctgtaaagcccctggcaacaccctgaaaacctacgacctgcactgggtccgatctgtgcctggacaaggactgcagtggatgggctggattagccacgagggcgacaagaaagtgatcgtggaacggttcaaggccaaagtgaccatcgactgggacagaagcaccaacaccgcctacctgcagctgagcggactgacatctggcgataccgccgtgtactactgtgccaagggcagcaagcaccggctgagagattacgccctgtacgacgatgacggcgccctgaattgggccgtcgatgtggactacctgagcaacctggaattctggggccagggaacagccgtgacagtgtcttccggcggcggaggaagcggagggggaggctctggaggtggtggctctggtggcggaggctcaggcggtggcggatctgattttgtgctgacacagagccctcacagcctgagcgttacacctggcgagagcgccagcatcagctgcaagtctagccactctctgatccacggcgaccggaacaactacctggcttggtacgtgcagaagcccggcagatctcctcagctgctgatctacctggccagcagcagagctagcggcgtgccagatagattttctggcagcggcagcgacaaggatttcaccctgaagatctccagagtggaaaccgaggacgtgggcacctactactgtatgcagggcagagagagcccctggacatttggccagggcaccaaggtggacatcaaaggcggaggtggaagtggtggtggcggtagcggaggcggtgggtccggaggtggtggatctgaacctaagagcagcgacaagacccacacctgtcctccatgtcctgctccagaactgctggccggaccttccgtgttcctgtttcctccaaagcctaaggacaccctgatgatcagcagaacccctgaagtgacctgcgtggtggtggatgtgtctcacgaggaccctgaagtgaagttcaattggtacgtggacggcgtggaagtgcacaacgccaagaccaagcctagagaggaacagtacaacagcacctacagagtggtgtccgtgctgaccgtgctgcaccaggattggctgaacggcaaagagtacaagtgcaaggtgtccaacaaggccctgcctgcccctgaggaaaagaccatcagcaaggccaagggccagcctagggaaccccaagtctgtacactgcctcctagccgcgaggaaatgaccaagaaccaggtgtccctgagctgcgccgtgaagggcttttacccttccgatatcgccgtggaatgggagagcaatggccagcctgagaacaactacaagacaacccctcctgtgctggacagcgacggctcattcttcctggtgtccaagctgacagtggacaagagcagatggcagcagggcaacgtgttcagctgctctgtgctgcacgaagccctgcacagccactacacccagaagtccctgtctctgagccccggcaagtgataaggatccgatctggtactgcatgcacgcaatgctagctgcccctttcccgtcctgggtaccccgagtctcccccgacctcgggtcccaggtatgctcccacctccacctgccccactcaccacctctgctagttccagacacctcccaagcacgcagcaatgcagctcaaaacgcttagcctagccacacccccacgggaaacagcagtgattaacctttagcaataaacgaaagtttaactaagctatactaaccccagggttggtcaatttcgtgccagccacaccctcgagctagcaaaaaaaaaaaaaaaaaaaaaaaaaaaaaagcatatgactaaaaaaaaaaaaaaaaaaaaaaaaaaaaaaaaaaaaaaaaaaaaaaaaaaaaaaaaaaaaaaaaaaaaaa

SEQ ID NO: 1104 - RNA, 2114 nt, synthetic construct
  source 1..2114: mol_type = other RNA
agaataaactagtattcttctggtccccacagactcagagagaacccgccaccatggattggatctggcgcatcctgtttctcgtgggagctgccacaggcgcccactctcaagttcacctgacacagtctggccccgaagtgcggaagcctggcacaagcgtgaaggtgtcctgtaaagcccctggcaacaccctgaaaacctacgacctgcactgggtccgatctgtgcctggacaaggactgcagtggatgggctggattagccacgagggcgacaagaaagtgatcgtggaacggttcaaggccaaagtgaccatcgactgggacagaagcaccaacaccgcctacctgcagctgagcggactgacatctggcgataccgccgtgtactactgtgccaagggcagcaagcaccggctgagagattacgccctgtacgacgatgacggcgccctgaattgggccgtcgatgtggactacctgagcaacctggaattctggggccagggaacagccgtgacagtgtcttccggcggcggaggaagcggagggggaggctctggaggtggtggctctggtggcggaggctcaggcggtggcggatctgattttgtgctgacacagagccctcacagcctgagcgttacacctggcgagagcgccagcatcagctgcaagtctagccactctctgatccacggcgaccggaacaactacctggcttggtacgtgcagaagcccggcagatctcctcagctgctgatctacctggccagcagcagagctagcggcgtgccagatagattttctggcagcggcagcgacaaggatttcaccctgaagatctccagagtggaaaccgaggacgtgggcacctactactgtatgcagggcagagagagcccctggacatttggccagggcaccaaggtggacatcaaaggcggaggtggaagtggtggtggcggtagcggaggcggtgggtccggaggtggtggatctgaacctaagagcagcgacaagacccacacctgtcctccatgtcctgctccagaactgctggccggaccttccgtgttcctgtttcctccaaagcctaaggacaccctgatgatcagcagaacccctgaagtgacctgcgtggtggtggatgtgtctcacgaggaccctgaagtgaagttcaattggtacgtggacggcgtggaagtgcacaacgccaagaccaagcctagagaggaacagtacaacagcacctacagagtggtgtccgtgctgaccgtgctgcaccaggattggctgaacggcaaagagtacaagtgcaaggtgtccaacaaggccctgcctgcccctatcgaaaagaccatcagcaaggccaagggccagcctagggaaccccaagtctgtacactgcctcctagccgcgaggaaatgaccaagaaccaggtgtccctgagctgcgccgtgaagggcttttacccttccgatatcgccgtggaatgggagagcaatggccagcctgagaacaactacaagacaacccctcctgtgctggacagcgacggctcattcttcctggtgtccaagctgacagtggacaagagcagatggcagcagggcaacgtgttcagctgctctgtgctgcacgaagccctgcacagccactacacccagaagtccctgtctctgagccccggcaagtgataaggatccgatctggtactgcatgcacgcaatgctagctgcccctttcccgtcctgggtaccccgagtctcccccgacctcgggtcccaggtatgctcccacctccacctgccccactcaccacctctgctagttccagacacctcccaagcacgcagcaatgcagctcaaaacgcttagcctagccacacccccacgggaaacagcagtgattaacctttagcaataaacgaaagtttaactaagctatactaaccccagggttggtcaatttcgtgccagccacaccctcgagctagcaaaaaaaaaaaaaaaaaaaaaaaaaaaaaagcatatgactaaaaaaaaaaaaaaaaaaaaaaaaaaaaaaaaaaaaaaaaaaaaaaaaaaaaaaaaaaaaaaaaaaaaaa

SEQ ID NO: 1105 - RNA, 2114 nt, synthetic construct
  source 1..2114: mol_type = other RNA
agaataaactagtattcttctggtccccacagactcagagagaacccgccaccatggattggatctggcgcatcctgtttctcgtgggagctgccacaggcgcccactctcaagttcacctgacacagtctggccccgaagtgcggaagcctggcacaagcgtgaaggtgtcctgtaaagcccctggcaacaccctgaaaacctacgacctgcactgggtccgatctgtgcctggacaaggactgcagtggatgggctggattagccacgagggcgacaagaaagtgatcgtggaacggttcaaggccaaagtgaccatcgactgggacagaagcaccaacaccgcctacctgcagctgagcggactgacatctggcgataccgccgtgtactactgtgccaagggcagcaagcaccggctgagagattacgccctgtacgacgatgacggcgccctgaattgggccgtcgatgtggactacctgagcaacctggaattctggggccagggaacagccgtgacagtgtcttccggcggcggaggaagcggagggggaggctctggaggtggtggctctggtggcggaggctcaggcggtggcggatctgattttgtgctgacacagagccctcacagcctgagcgttacacctggcgagagcgccagcatcagctgcaagtctagccactctctgatccacggcgaccggaacaactacctggcttggtacgtgcagaagcccggcagatctcctcagctgctgatctacctggccagcagcagagctagcggcgtgccagatagattttctggcagcggcagcgacaaggatttcaccctgaagatctccagagtggaaaccgaggacgtgggcacctactactgtatgcagggcagagagagcccctggacatttggccagggcaccaaggtggacatcaaaggcggaggtggaagtggtggtggcggtagcggaggcggtgggtccggaggtggtggatctgaacctaagagcagcgacaagacccacacctgtcctccatgtcctgctccagaactgctgggcggaccttccgtgttcctgtttcctccaaagcctaaggacaccctgatgatcagcagaacccctgaagtgacctgcgtggtggtggatgtgtctcacgaggaccctgaagtgaagttcaattggtacgtggacggcgtggaagtgcacaacgccaagaccaagcctagagaggaacagtacaacagcacctacagagtggtgtccgtgctgaccgtgctgcaccaggattggctgaacggcaaagagtacaagtgcaaggtgtccaacaaggccctgcctgcccctgaggaaaagaccatcagcaaggccaagggccagcctagggaaccccaagtctgtacactgcctcctagccgcgaggaaatgaccaagaaccaggtgtccctgagctgcgccgtgaagggcttttacccttccgatatcgccgtggaatgggagagcaatggccagcctgagaacaactacaagacaacccctcctgtgctggacagcgacggctcattcttcctggtgtccaagctgacagtggacaagagcagatggcagcagggcaacgtgttcagctgctctgtgctgcacgaagccctgcacagccactacacccagaagtccctgtctctgagccccggcaagtgataaggatccgatctggtactgcatgcacgcaatgctagctgcccctttcccgtcctgggtaccccgagtctcccccgacctcgggtcccaggtatgctcccacctccacctgccccactcaccacctctgctagttccagacacctcccaagcacgcagcaatgcagctcaaaacgcttagcctagccacacccccacgggaaacagcagtgattaacctttagcaataaacgaaagtttaactaagctatactaaccccagggttggtcaatttcgtgccagccacaccctcgagctagcaaaaaaaaaaaaaaaaaaaaaaaaaaaaaagcatatgactaaaaaaaaaaaaaaaaaaaaaaaaaaaaaaaaaaaaaaaaaaaaaaaaaaaaaaaaaaaaaaaaaaaaaa

SEQ ID NO: 1106 - RNA, 2114 nt, synthetic construct
  source 1..2114: mol_type = other RNA
agaataaactagtattcttctggtccccacagactcagagagaacccgccaccatggattggatctggcgcatcctgtttctcgtgggagctgccacaggcgcccactctcaagttcacctgacacagtctggccccgaagtgcggaagcctggcacaagcgtgaaggtgtcctgtaaagcccctggcaacaccctgaaaacctacgacctgcactgggtccgatctgtgcctggacaaggactgcagtggatgggctggattagccacgagggcgacaagaaagtgatcgtggaacggttcaaggccaaagtgaccatcgactgggacagaagcaccaacaccgcctacctgcagctgagcggactgacatctggcgataccgccgtgtactactgtgccaagggcagcaagcaccggctgagagattacgccctgtacgacgatgacggcgccctgaattgggccgtcgatgtggactacctgagcaacctggaattctggggccagggaacagccgtgacagtgtcttccggcggcggaggaagcggagggggaggctctggaggtggtggctctggtggcggaggctcaggcggtggcggatctgattttgtgctgacacagagccctcacagcctgagcgttacacctggcgagagcgccagcatcagctgcaagtctagccactctctgatccacggcgaccggaacaactacctggcttggtacgtgcagaagcccggcagatctcctcagctgctgatctacctggccagcagcagagctagcggcgtgccagatagattttctggcagcggcagcgacaaggatttcaccctgaagatctccagagtggaaaccgaggacgtgggcacctactactgtatgcagggcagagagagcccctggacatttggccagggcaccaaggtggacatcaaaggcggaggtggaagtggtggtggcggtagcggaggcggtgggtccggaggtggtggatctgaacctaagagcagcgacaagacccacacctgtcctccatgtcctgctccagaactgctcggcggaccttccgtgttcctgtttcctccaaagcctaaggacaccctgatgatcagcagaacccctgaagtgacctgcgtggtggtggatgtgtctcacgaggaccccgaagtgaagttcaattggtacgtggacggcgtggaagtgcacaacgccaagaccaagcctagagaggaacagtacaacagcacctacagagtggtgtccgtgctgacagtgctgcaccaggattggctgaacggcaaagagtacaagtgcaaggtgtccaacaaggccctgcctgctcctatcgagaaaaccatcagcaaggccaagggccagcctagggaaccccaggtttacaccctgcctccatgccgcgaggaaatgaccaagaaccaggtgtccctgtggtgcctcgtgaagggcttctacccttccgatatcgccgtggaatgggagagcaatggccagcctgagaacaactacaagacaacccctcctgtgctggacagcgacggctcattcttcctgtacagcaagctgaccgtggacaagtccagatggcagcagggcaacgtgttcagctgtagcgtgctgcacgaagccctgcacagccactacacccagaagtccctgtctctgagccccggcaagtgataaggatccgatctggtactgcatgcacgcaatgctagctgcccctttcccgtcctgggtaccccgagtctcccccgacctcgggtcccaggtatgctcccacctccacctgccccactcaccacctctgctagttccagacacctcccaagcacgcagcaatgcagctcaaaacgcttagcctagccacacccccacgggaaacagcagtgattaacctttagcaataaacgaaagtttaactaagctatactaaccccagggttggtcaatttcgtgccagccacaccctcgagctagcaaaaaaaaaaaaaaaaaaaaaaaaaaaaaagcatatgactaaaaaaaaaaaaaaaaaaaaaaaaaaaaaaaaaaaaaaaaaaaaaaaaaaaaaaaaaaaaaaaaaaaaaa

SEQ ID NO: 1107 - RNA, 2114 nt, synthetic construct
  source 1..2114: mol_type = other RNA
agaataaactagtattcttctggtccccacagactcagagagaacccgccaccatggattggatctggcgcatcctgtttctcgtgggagctgccacaggcgcccactctcaagttcacctgacacagtctggccccgaagtgcggaagcctggcacaagcgtgaaggtgtcctgtaaagcccctggcaacaccctgaaaacctacgacctgcactgggtccgatctgtgcctggacaaggactgcagtggatgggctggattagccacgagggcgacaagaaagtgatcgtggaacggttcaaggccaaagtgaccatcgactgggacagaagcaccaacaccgcctacctgcagctgagcggactgacatctggcgataccgccgtgtactactgtgccaagggcagcaagcaccggctgagagattacgccctgtacgacgatgacggcgccctgaattgggccgtcgatgtggactacctgagcaacctggaattctggggccagggaacagccgtgacagtgtcttccggcggcggaggaagcggagggggaggctctggaggtggtggctctggtggcggaggctcaggcggtggcggatctgattttgtgctgacacagagccctcacagcctgagcgttacacctggcgagagcgccagcatcagctgcaagtctagccactctctgatccacggcgaccggaacaactacctggcttggtacgtgcagaagcccggcagatctcctcagctgctgatctacctggccagcagcagagctagcggcgtgccagatagattttctggcagcggcagcgacaaggatttcaccctgaagatctccagagtggaaaccgaggacgtgggcacctactactgtatgcagggcagagagagcccctggacatttggccagggcaccaaggtggacatcaaaggcggaggtggaagtggtggtggcggtagcggaggcggtgggtccggaggtggtggatctgaacctaagagcagcgacaagacccacacctgtcctccatgtcctgctccagaactgctggccggaccttccgtgttcctgtttcctccaaagcctaaggacaccctgatgatcagcagaacccctgaagtgacctgcgtggtggtggatgtgtctcacgaggaccccgaagtgaagttcaattggtacgtggacggcgtggaagtgcacaatgccaagaccaagcctagagaggaacagtacaacagcacctacagagtggtgtccgtgctgaccgtgctgcaccaggattggctgaacggcaaagagtacaagtgcaaggtgtccaacaaggccctgcctctgcctgaggaaaagaccatcagcaaggccaagggccagcctagggaaccccaggtttacaccctgcctccatgccgcgaggaaatgaccaagaaccaggtgtccctgtggtgcctcgtgaagggcttctacccttccgatatcgccgtggaatgggagagcaatggccagcctgagaacaactacaagacaacccctcctgtgctggacagcgacggctcattcttcctgtacagcaagctgaccgtggacaagtccagatggcagcagggcaacgtgttcagctgtagcgtgctgcacgaagccctgcacagccactacacccagaagtccctgtctctgagccccggcaagtgataaggatccgatctggtactgcatgcacgcaatgctagctgcccctttcccgtcctgggtaccccgagtctcccccgacctcgggtcccaggtatgctcccacctccacctgccccactcaccacctctgctagttccagacacctcccaagcacgcagcaatgcagctcaaaacgcttagcctagccacacccccacgggaaacagcagtgattaacctttagcaataaacgaaagtttaactaagctatactaaccccagggttggtcaatttcgtgccagccacaccctcgagctagcaaaaaaaaaaaaaaaaaaaaaaaaaaaaaagcatatgactaaaaaaaaaaaaaaaaaaaaaaaaaaaaaaaaaaaaaaaaaaaaaaaaaaaaaaaaaaaaaaaaaaaaaa

SEQ ID NO: 1108 - RNA, 2114 nt, synthetic construct
  source 1..2114: mol_type = other RNA
agaataaactagtattcttctggtccccacagactcagagagaacccgccaccatggattggatctggcgcatcctgtttctcgtgggagctgccacaggcgcccactctcaagttcacctgacacagtctggccccgaagtgcggaagcctggcacaagcgtgaaggtgtcctgtaaagcccctggcaacaccctgaaaacctacgacctgcactgggtccgatctgtgcctggacaaggactgcagtggatgggctggattagccacgagggcgacaagaaagtgatcgtggaacggttcaaggccaaagtgaccatcgactgggacagaagcaccaacaccgcctacctgcagctgagcggactgacatctggcgataccgccgtgtactactgtgccaagggcagcaagcaccggctgagagattacgccctgtacgacgatgacggcgccctgaattgggccgtcgatgtggactacctgagcaacctggaattctggggccagggaacagccgtgacagtgtcttccggcggcggaggaagcggagggggaggctctggaggtggtggctctggtggcggaggctcaggcggtggcggatctgattttgtgctgacacagagccctcacagcctgagcgttacacctggcgagagcgccagcatcagctgcaagtctagccactctctgatccacggcgaccggaacaactacctggcttggtacgtgcagaagcccggcagatctcctcagctgctgatctacctggccagcagcagagctagcggcgtgccagatagattttctggcagcggcagcgacaaggatttcaccctgaagatctccagagtggaaaccgaggacgtgggcacctactactgtatgcagggcagagagagcccctggacatttggccagggcaccaaggtggacatcaaaggcggaggtggaagtggtggtggcggtagcggaggcggtgggtccggaggtggtggatctgaacctaagagcagcgacaagacccacacctgtcctccatgtcctgctccagaactgctggccggaccttccgtgttcctgtttcctccaaagcctaaggacaccctgatgatcagcagaacccctgaagtgacctgcgtggtggtggatgtgtctcacgaggaccctgaagtgaagttcaattggtacgtggacggcgtggaagtgcacaacgccaagaccaagcctagagaggaacagtacaacagcacctacagagtggtgtccgtgctgaccgtgctgcaccaggattggctgaacggcaaagagtacaagtgcaaggtgtccaacaaggccctgcctgcccctgaggaaaagaccatcagcaaggccaagggccagcctagggaaccccaggtttacaccctgcctccatgccgcgaggaaatgaccaagaaccaggtgtccctgtggtgcctcgtgaagggcttctacccttccgatatcgccgtggaatgggagagcaatggccagcctgagaacaactacaagacaacccctcctgtgctggacagcgacggctcattcttcctgtacagcaagctgaccgtggacaagtccagatggcagcagggcaacgtgttcagctgtagcgtgctgcacgaagccctgcacagccactacacccagaagtccctgtctctgagccccggcaagtgataaggatccgatctggtactgcatgcacgcaatgctagctgcccctttcccgtcctgggtaccccgagtctcccccgacctcgggtcccaggtatgctcccacctccacctgccccactcaccacctctgctagttccagacacctcccaagcacgcagcaatgcagctcaaaacgcttagcctagccacacccccacgggaaacagcagtgattaacctttagcaataaacgaaagtttaactaagctatactaaccccagggttggtcaatttcgtgccagccacaccctcgagctagcaaaaaaaaaaaaaaaaaaaaaaaaaaaaaagcatatgactaaaaaaaaaaaaaaaaaaaaaaaaaaaaaaaaaaaaaaaaaaaaaaaaaaaaaaaaaaaaaaaaaaaaaa

SEQ ID NO: 1109 - RNA, 2114 nt, synthetic construct
  source 1..2114: mol_type = other RNA
agaataaactagtattcttctggtccccacagactcagagagaacccgccaccatggattggatctggcgcatcctgtttctcgtgggagctgccacaggcgcccactctcaagttcacctgacacagtctggccccgaagtgcggaagcctggcacaagcgtgaaggtgtcctgtaaagcccctggcaacaccctgaaaacctacgacctgcactgggtccgatctgtgcctggacaaggactgcagtggatgggctggattagccacgagggcgacaagaaagtgatcgtggaacggttcaaggccaaagtgaccatcgactgggacagaagcaccaacaccgcctacctgcagctgagcggactgacatctggcgataccgccgtgtactactgtgccaagggcagcaagcaccggctgagagattacgccctgtacgacgatgacggcgccctgaattgggccgtcgatgtggactacctgagcaacctggaattctggggccagggaacagccgtgacagtgtcttccggcggcggaggaagcggagggggaggctctggaggtggtggctctggtggcggaggctcaggcggtggcggatctgattttgtgctgacacagagccctcacagcctgagcgttacacctggcgagagcgccagcatcagctgcaagtctagccactctctgatccacggcgaccggaacaactacctggcttggtacgtgcagaagcccggcagatctcctcagctgctgatctacctggccagcagcagagctagcggcgtgccagatagattttctggcagcggcagcgacaaggatttcaccctgaagatctccagagtggaaaccgaggacgtgggcacctactactgtatgcagggcagagagagcccctggacatttggccagggcaccaaggtggacatcaaaggcggaggtggaagtggtggtggcggtagcggaggcggtgggtccggaggtggtggatctgaacctaagagcagcgacaagacccacacctgtcctccatgtcctgctccagaactgctggccggaccttccgtgttcctgtttcctccaaagcctaaggacaccctgatgatcagcagaacccctgaagtgacctgcgtggtggtggatgtgtctcacgaggaccctgaagtgaagttcaattggtacgtggacggcgtggaagtgcacaacgccaagaccaagcctagagaggaacagtacaacagcacctacagagtggtgtccgtgctgaccgtgctgcaccaggattggctgaacggcaaagagtacaagtgcaaggtgtccaacaaggccctgcctgcccctatcgaaaagaccatcagcaaggccaagggccagcctagggaaccccaggtttacaccctgcctccatgccgcgaggaaatgaccaagaaccaggtgtccctgtggtgcctcgtgaagggcttctacccttccgatatcgccgtggaatgggagagcaatggccagcctgagaacaactacaagacaacccctcctgtgctggacagcgacggctcattcttcctgtacagcaagctgaccgtggacaagtccagatggcagcagggcaacgtgttcagctgtagcgtgctgcacgaagccctgcacagccactacacccagaagtccctgtctctgagccccggcaagtgataaggatccgatctggtactgcatgcacgcaatgctagctgcccctttcccgtcctgggtaccccgagtctcccccgacctcgggtcccaggtatgctcccacctccacctgccccactcaccacctctgctagttccagacacctcccaagcacgcagcaatgcagctcaaaacgcttagcctagccacacccccacgggaaacagcagtgattaacctttagcaataaacgaaagtttaactaagctatactaaccccagggttggtcaatttcgtgccagccacaccctcgagctagcaaaaaaaaaaaaaaaaaaaaaaaaaaaaaagcatatgactaaaaaaaaaaaaaaaaaaaaaaaaaaaaaaaaaaaaaaaaaaaaaaaaaaaaaaaaaaaaaaaaaaaaaa

SEQ ID NO: 1110 - RNA, 2114 nt, synthetic construct
  source 1..2114: mol_type = other RNA
agaataaactagtattcttctggtccccacagactcagagagaacccgccaccatggattggatctggcgcatcctgtttctcgtgggagctgccacaggcgcccactctcaagttcacctgacacagtctggccccgaagtgcggaagcctggcacaagcgtgaaggtgtcctgtaaagcccctggcaacaccctgaaaacctacgacctgcactgggtccgatctgtgcctggacaaggactgcagtggatgggctggattagccacgagggcgacaagaaagtgatcgtggaacggttcaaggccaaagtgaccatcgactgggacagaagcaccaacaccgcctacctgcagctgagcggactgacatctggcgataccgccgtgtactactgtgccaagggcagcaagcaccggctgagagattacgccctgtacgacgatgacggcgccctgaattgggccgtcgatgtggactacctgagcaacctggaattctggggccagggaacagccgtgacagtgtcttccggcggcggaggaagcggagggggaggctctggaggtggtggctctggtggcggaggctcaggcggtggcggatctgattttgtgctgacacagagccctcacagcctgagcgttacacctggcgagagcgccagcatcagctgcaagtctagccactctctgatccacggcgaccggaacaactacctggcttggtacgtgcagaagcccggcagatctcctcagctgctgatctacctggccagcagcagagctagcggcgtgccagatagattttctggcagcggcagcgacaaggatttcaccctgaagatctccagagtggaaaccgaggacgtgggcacctactactgtatgcagggcagagagagcccctggacatttggccagggcaccaaggtggacatcaaaggcggaggtggaagtggtggtggcggtagcggaggcggtgggtccggaggtggtggatctgaacctaagagcagcgacaagacccacacctgtcctccatgtcctgctccagaactgctgggcggaccttccgtgttcctgtttcctccaaagcctaaggacaccctgatgatcagcagaacccctgaagtgacctgcgtggtggtggatgtgtctcacgaggaccctgaagtgaagttcaattggtacgtggacggcgtggaagtgcacaacgccaagaccaagcctagagaggaacagtacaacagcacctacagagtggtgtccgtgctgaccgtgctgcaccaggattggctgaacggcaaagagtacaagtgcaaggtgtccaacaaggccctgcctgcccctgaggaaaagaccatcagcaaggccaagggccagcctagggaaccccaggtttacaccctgcctccatgccgcgaggaaatgaccaagaaccaggtgtccctgtggtgcctcgtgaagggcttctacccttccgatatcgccgtggaatgggagagcaatggccagcctgagaacaactacaagacaacccctcctgtgctggacagcgacggctcattcttcctgtacagcaagctgaccgtggacaagtccagatggcagcagggcaacgtgttcagctgtagcgtgctgcacgaagccctgcacagccactacacccagaagtccctgtctctgagccccggcaagtgataaggatccgatctggtactgcatgcacgcaatgctagctgcccctttcccgtcctgggtaccccgagtctcccccgacctcgggtcccaggtatgctcccacctccacctgccccactcaccacctctgctagttccagacacctcccaagcacgcagcaatgcagctcaaaacgcttagcctagccacacccccacgggaaacagcagtgattaacctttagcaataaacgaaagtttaactaagctatactaaccccagggttggtcaatttcgtgccagccacaccctcgagctagcaaaaaaaaaaaaaaaaaaaaaaaaaaaaaagcatatgactaaaaaaaaaaaaaaaaaaaaaaaaaaaaaaaaaaaaaaaaaaaaaaaaaaaaaaaaaaaaaaaaaaaaaa

SEQ ID NO: 1111 - RNA, 2114 nt, synthetic construct; identical to SEQ ID NO: 1095
  source 1..2114: mol_type = other RNA

SEQ ID NO: 1112 - RNA, 2114 nt, synthetic construct; identical to SEQ ID NO: 1096
  source 1..2114: mol_type = other RNA

SEQ ID NO: 1113 - RNA, 2114 nt, synthetic construct; identical to SEQ ID NO: 1097
  source 1..2114: mol_type = other RNA

SEQ ID NO: 1114 - RNA, 2114 nt, synthetic construct; identical to SEQ ID NO: 1098
  source 1..2114: mol_type = other RNA

SEQ ID NO: 1115 - RNA, 2114 nt, synthetic construct; identical to SEQ ID NO: 1099
  source 1..2114: mol_type = other RNA

SEQ ID NO: 1116 - RNA, 2114 nt, synthetic construct; identical to SEQ ID NO: 1100
  source 1..2114: mol_type = other RNA

SEQ ID NO: 1117 - RNA, 2114 nt, synthetic construct; identical to SEQ ID NO: 1101
  source 1..2114: mol_type = other RNA

SEQ ID NO: 1118 - RNA, 2114 nt, synthetic construct; identical to SEQ ID NO: 1102
  source 1..2114: mol_type = other RNA

SEQ ID NO: 1119 - RNA, 2114 nt, synthetic construct; identical to SEQ ID NO: 1103
  source 1..2114: mol_type = other RNA

SEQ ID NO: 1120 - RNA, 2114 nt, synthetic construct; identical to SEQ ID NO: 1104
  source 1..2114: mol_type = other RNA

SEQ ID NO: 1121 - RNA, 2114 nt, synthetic construct; identical to SEQ ID NO: 1105
  source 1..2114: mol_type = other RNA

SEQ ID NO: 1122 - RNA, 2114 nt, synthetic construct; identical to SEQ ID NO: 1106
  source 1..2114: mol_type = other RNA

SEQ ID NO: 1123 - RNA, 2114 nt, synthetic construct; identical to SEQ ID NO: 1107
  source 1..2114: mol_type = other RNA

SEQ ID NO: 1124 - RNA, 2114 nt, synthetic construct; identical to SEQ ID NO: 1108
  source 1..2114: mol_type = other RNA

SEQ ID NO: 1125 - RNA, 2114 nt, synthetic construct; identical to SEQ ID NO: 1109
  source 1..2114: mol_type = other RNA

SEQ ID NO: 1126 - RNA, 2114 nt, synthetic construct; identical to SEQ ID NO: 1110
  source 1..2114: mol_type = other RNA

SEQ ID NO: 1127 - RNA, 2114 nt, synthetic construct
  source 1..2114: mol_type = other RNA
agaataaactagtattcttctggtccccacagactcagagagaacccgccaccatggattggatctggcgcatcctgtttctcgtgggagctgccacaggcgcccactctcaagttcacctgacacagtctggccccgaagtgcggaagcctggcacaagcgtgaaggtgtcctgtaaagcccctggcaacaccctgaaaacctacgacctgcactgggtccgatctgtgcctggacaaggactgcagtggatgggctggattagccacgagggcgacaagaaagtgatcgtggaacggttcaaggccaaagtgaccatcgactgggacagaagcaccaacaccgcctacctgcagctgagcggactgacatctggcgataccgccgtgtactactgtgccaagggcagcaagcaccggctgagagattacgccctgtacgacgatgacggcgccctgaattgggccgtcgatgtggactacctgagcaacctggaattctggggccagggaacagccgtgacagtgtcttccggcggcggaggaagcggagggggaggctctggaggtggtggctctggtggcggaggctcaggcggtggcggatctgattttgtgctgacacagagccctcacagcctgagcgttacacctggcgagagcgccagcatcagctgcaagtctagccactctctgatccacggcgaccggaacaactacctggcttggtacgtgcagaagcccggcagatctcctcagctgctgatctacctggccagcagcagagctagcggcgtgccagatagattttctggcagcggcagcgacaaggatttcaccctgaagatctccagagtggaaaccgaggacgtgggcacctactactgtatgcagggcagagagagcccctggacatttggccagggcaccaaggtggacatcaaaggcggaggtggaagtggtggtggcggtagcggaggcggtgggtccggaggtggtggatctgaacctaagagcagcgacaagacccacacctgtcctccatgtcctgctccagaactgctcggcggaccttccgtgttcctgtttcctccaaagcctaaggacaccctgatgatcagcagaacccctgaagtgacctgcgtggtggtggatgtgtctcacgaggaccccgaagtgaagttcaattggtacgtggacggcgtggaagtgcacaacgccaagaccaagcctagagaggaacagtacaacagcacctacagagtggtgtccgtgctgacagtgctgcaccaggattggctgaacggcaaagagtacaagtgcaaggtgtccaacaaggccctgcctgctcctatcgagaaaaccatcagcaaggccaagggccagcctagggaaccccaggtttacacactgcctccaagccgcgacgaactgaccaagaaccaggtgtccctgacctgcctcgtgaagggcttctacccttccgatatcgccgtggaatgggagagcaatggccagcctgagaacaactacaagacaacccctcctgtgctggacagcgacggctcattcttcctgtacagcaagctgactgtggataagtcccggtggcagcagggcaacgtgttcagctgttctgtgatgcacgaagccctgcacaaccactacacccagaaaagcctgtctctgagccccggcaagtgataaggatccgatctggtactgcatgcacgcaatgctagctgcccctttcccgtcctgggtaccccgagtctcccccgacctcgggtcccaggtatgctcccacctccacctgccccactcaccacctctgctagttccagacacctcccaagcacgcagcaatgcagctcaaaacgcttagcctagccacacccccacgggaaacagcagtgattaacctttagcaataaacgaaagtttaactaagctatactaaccccagggttggtcaatttcgtgccagccacaccctcgagctagcaaaaaaaaaaaaaaaaaaaaaaaaaaaaaagcatatgactaaaaaaaaaaaaaaaaaaaaaaaaaaaaaaaaaaaaaaaaaaaaaaaaaaaaaaaaaaaaaaaaaaaaaa

SEQ ID NO: 1128 - RNA, 2114 nt, synthetic construct
  source 1..2114: mol_type = other RNA
agaataaactagtattcttctggtccccacagactcagagagaacccgccaccatggattggatctggcgcatcctgtttctcgtgggagctgccacaggcgcccactctcaagttcacctgacacagtctggccccgaagtgcggaagcctggcacaagcgtgaaggtgtcctgtaaagcccctggcaacaccctgaaaacctacgacctgcactgggtccgatctgtgcctggacaaggactgcagtggatgggctggattagccacgagggcgacaagaaagtgatcgtggaacggttcaaggccaaagtgaccatcgactgggacagaagcaccaacaccgcctacctgcagctgagcggactgacatctggcgataccgccgtgtactactgtgccaagggcagcaagcaccggctgagagattacgccctgtacgacgatgacggcgccctgaattgggccgtcgatgtggactacctgagcaacctggaattctggggccagggaacagccgtgacagtgtcttccggcggcggaggaagcggagggggaggctctggaggtggtggctctggtggcggaggctcaggcggtggcggatctgattttgtgctgacacagagccctcacagcctgagcgttacacctggcgagagcgccagcatcagctgcaagtctagccactctctgatccacggcgaccggaacaactacctggcttggtacgtgcagaagcccggcagatctcctcagctgctgatctacctggccagcagcagagctagcggcgtgccagatagattttctggcagcggcagcgacaaggatttcaccctgaagatctccagagtggaaaccgaggacgtgggcacctactactgtatgcagggcagagagagcccctggacatttggccagggcaccaaggtggacatcaaaggcggaggtggaagtggtggtggcggtagcggaggcggtgggtccggaggtggtggatctgaacctaagagcagcgacaagacccacacctgtcctccatgtcctgctccagaactgctcggcggaccttccgtgttcctgtttcctccaaagcctaaggacaccctgatgatcagcagaacccctgaagtgacctgcgtggtggtggatgtgtctcacgaggaccccgaagtgaagttcaattggtacgtggacggcgtggaagtgcacaacgccaagaccaagcctagagaggaacagtacaacagcacctacagagtggtgtccgtgctgacagtgctgcaccaggattggctgaacggcaaagagtacaagtgcaaggtgtccaacaaggccctgcctgctcctatcgagaaaaccatcagcaaggccaagggccagcctagggaaccccaggtttacacactgcctccaagccgcgacgaactgaccaagaaccaggtgtccctgacctgcctcgtgaagggcttctacccttccgatatcgccgtggaatgggagagcaatggccagcctgagaacaactacaagacaacccctcctgtgctggacagcgacggctcattcttcctgtacagcaagctgaccgtggacaagtccagatggcagcagggcaacgtgttcagctgtagcgtgctgcacgaagccctgcacagccactacacccagaaaagcctgtctctgagccccggcaaatgataaggatccgatctggtactgcatgcacgcaatgctagctgcccctttcccgtcctgggtaccccgagtctcccccgacctcgggtcccaggtatgctcccacctccacctgccccactcaccacctctgctagttccagacacctcccaagcacgcagcaatgcagctcaaaacgcttagcctagccacacccccacgggaaacagcagtgattaacctttagcaataaacgaaagtttaactaagctatactaaccccagggttggtcaatttcgtgccagccacaccctcgagctagcaaaaaaaaaaaaaaaaaaaaaaaaaaaaaagcatatgactaaaaaaaaaaaaaaaaaaaaaaaaaaaaaaaaaaaaaaaaaaaaaaaaaaaaaaaaaaaaaaaaaaaaaa

SEQ ID NO: 1129 - RNA, 2114 nt, synthetic construct
  source 1..2114: mol_type = other RNA
agaataaactagtattcttctggtccccacagactcagagagaacccgccaccatggattggatctggcgcatcctgtttctcgtgggagctgccacaggcgcccactctcaagttcacctgacacagtctggccccgaagtgcggaagcctggcacaagcgtgaaggtgtcctgtaaagcccctggcaacaccctgaaaacctacgacctgcactgggtccgatctgtgcctggacaaggactgcagtggatgggctggattagccacgagggcgacaagaaagtgatcgtggaacggttcaaggccaaagtgaccatcgactgggacagaagcaccaacaccgcctacctgcagctgagcggactgacatctggcgataccgccgtgtactactgtgccaagggcagcaagcaccggctgagagattacgccctgtacgacgatgacggcgccctgaattgggccgtcgatgtggactacctgagcaacctggaattctggggccagggaacagccgtgacagtgtcttccggcggcggaggaagcggagggggaggctctggaggtggtggctctggtggcggaggctcaggcggtggcggatctgattttgtgctgacacagagccctcacagcctgagcgttacacctggcgagagcgccagcatcagctgcaagtctagccactctctgatccacggcgaccggaacaactacctggcttggtacgtgcagaagcccggcagatctcctcagctgctgatctacctggccagcagcagagctagcggcgtgccagatagattttctggcagcggcagcgacaaggatttcaccctgaagatctccagagtggaaaccgaggacgtgggcacctactactgtatgcagggcagagagagcccctggacatttggccagggcaccaaggtggacatcaaaggcggaggtggaagtggtggtggcggtagcggaggcggtgggtccggaggtggtggatctgaacctaagagcagcgacaagacccacacctgtcctccatgtcctgctccagaactgctggccggaccttccgtgttcctgtttcctccaaagcctaaggacaccctgatgatcagcagaacccctgaagtgacctgcgtggtggtggatgtgtctcacgaggaccccgaagtgaagttcaattggtacgtggacggcgtggaagtgcacaatgccaagaccaagcctagagaggaacagtacaacagcacctacagagtggtgtccgtgctgaccgtgctgcaccaggattggctgaacggcaaagagtacaagtgcaaggtgtccaacaaggccctgcctctgcctgaggaaaagaccatcagcaaggccaagggccagcctagggaaccccaggtttacacactgcctccaagccgcgacgaactgaccaagaaccaggtgtccctgacctgcctcgtgaagggcttctacccttccgatatcgccgtggaatgggagagcaatggccagcctgagaacaactacaagacaacccctcctgtgctggacagcgacggctcattcttcctgtacagcaagctgaccgtggacaagtccagatggcagcagggcaacgtgttcagctgtagcgtgctgcacgaagccctgcacagccactacacccagaaaagcctgtctctgagccccggcaaatgataaggatccgatctggtactgcatgcacgcaatgctagctgcccctttcccgtcctgggtaccccgagtctcccccgacctcgggtcccaggtatgctcccacctccacctgccccactcaccacctctgctagttccagacacctcccaagcacgcagcaatgcagctcaaaacgcttagcctagccacacccccacgggaaacagcagtgattaacctttagcaataaacgaaagtttaactaagctatactaaccccagggttggtcaatttcgtgccagccacaccctcgagctagcaaaaaaaaaaaaaaaaaaaaaaaaaaaaaagcatatgactaaaaaaaaaaaaaaaaaaaaaaaaaaaaaaaaaaaaaaaaaaaaaaaaaaaaaaaaaaaaaaaaaaaaaa

SEQ ID NO: 1130 - RNA, 2114 nt, synthetic construct
  source 1..2114: mol_type = other RNA
agaataaactagtattcttctggtccccacagactcagagagaacccgccaccatggattggatctggcgcatcctgtttctcgtgggagctgccacaggcgcccactctcaagttcacctgacacagtctggccccgaagtgcggaagcctggcacaagcgtgaaggtgtcctgtaaagcccctggcaacaccctgaaaacctacgacctgcactgggtccgatctgtgcctggacaaggactgcagtggatgggctggattagccacgagggcgacaagaaagtgatcgtggaacggttcaaggccaaagtgaccatcgactgggacagaagcaccaacaccgcctacctgcagctgagcggactgacatctggcgataccgccgtgtactactgtgccaagggcagcaagcaccggctgagagattacgccctgtacgacgatgacggcgccctgaattgggccgtcgatgtggactacctgagcaacctggaattctggggccagggaacagccgtgacagtgtcttccggcggcggaggaagcggagggggaggctctggaggtggtggctctggtggcggaggctcaggcggtggcggatctgattttgtgctgacacagagccctcacagcctgagcgttacacctggcgagagcgccagcatcagctgcaagtctagccactctctgatccacggcgaccggaacaactacctggcttggtacgtgcagaagcccggcagatctcctcagctgctgatctacctggccagcagcagagctagcggcgtgccagatagattttctggcagcggcagcgacaaggatttcaccctgaagatctccagagtggaaaccgaggacgtgggcacctactactgtatgcagggcagagagagcccctggacatttggccagggcaccaaggtggacatcaaaggcggaggtggaagtggtggtggcggtagcggaggcggtgggtccggaggtggtggatctgaacctaagagcagcgacaagacccacacctgtcctccatgtcctgctccagaactgctggccggaccttccgtgttcctgtttcctccaaagcctaaggacaccctgatgatcagcagaacccctgaagtgacctgcgtggtggtggatgtgtctcacgaggaccctgaagtgaagttcaattggtacgtggacggcgtggaagtgcacaacgccaagaccaagcctagagaggaacagtacaacagcacctacagagtggtgtccgtgctgaccgtgctgcaccaggattggctgaacggcaaagagtacaagtgcaaggtgtccaacaaggccctgcctgcccctgaggaaaagaccatcagcaaggccaagggccagcctagggaaccccaggtttacacactgcctccaagccgcgacgaactgaccaagaaccaggtgtccctgacctgcctcgtgaagggcttctacccttccgatatcgccgtggaatgggagagcaatggccagcctgagaacaactacaagacaacccctcctgtgctggacagcgacggctcattcttcctgtacagcaagctgaccgtggacaagtccagatggcagcagggcaacgtgttcagctgtagcgtgctgcacgaagccctgcacagccactacacccagaaaagcctgtctctgagccccggcaaatgataaggatccgatctggtactgcatgcacgcaatgctagctgcccctttcccgtcctgggtaccccgagtctcccccgacctcgggtcccaggtatgctcccacctccacctgccccactcaccacctctgctagttccagacacctcccaagcacgcagcaatgcagctcaaaacgcttagcctagccacacccccacgggaaacagcagtgattaacctttagcaataaacgaaagtttaactaagctatactaaccccagggttggtcaatttcgtgccagccacaccctcgagctagcaaaaaaaaaaaaaaaaaaaaaaaaaaaaaagcatatgactaaaaaaaaaaaaaaaaaaaaaaaaaaaaaaaaaaaaaaaaaaaaaaaaaaaaaaaaaaaaaaaaaaaaaa

SEQ ID NO: 1131 - RNA, 2114 nt, synthetic construct
  source 1..2114: mol_type = other RNA
agaataaactagtattcttctggtccccacagactcagagagaacccgccaccatggattggatctggcgcatcctgtttctcgtgggagctgccacaggcgcccactctcaagttcacctgacacagtctggccccgaagtgcggaagcctggcacaagcgtgaaggtgtcctgtaaagcccctggcaacaccctgaaaacctacgacctgcactgggtccgatctgtgcctggacaaggactgcagtggatgggctggattagccacgagggcgacaagaaagtgatcgtggaacggttcaaggccaaagtgaccatcgactgggacagaagcaccaacaccgcctacctgcagctgagcggactgacatctggcgataccgccgtgtactactgtgccaagggcagcaagcaccggctgagagattacgccctgtacgacgatgacggcgccctgaattgggccgtcgatgtggactacctgagcaacctggaattctggggccagggaacagccgtgacagtgtcttccggcggcggaggaagcggagggggaggctctggaggtggtggctctggtggcggaggctcaggcggtggcggatctgattttgtgctgacacagagccctcacagcctgagcgttacacctggcgagagcgccagcatcagctgcaagtctagccactctctgatccacggcgaccggaacaactacctggcttggtacgtgcagaagcccggcagatctcctcagctgctgatctacctggccagcagcagagctagcggcgtgccagatagattttctggcagcggcagcgacaaggatttcaccctgaagatctccagagtggaaaccgaggacgtgggcacctactactgtatgcagggcagagagagcccctggacatttggccagggcaccaaggtggacatcaaaggcggaggtggaagtggtggtggcggtagcggaggcggtgggtccggaggtggtggatctgaacctaagagcagcgacaagacccacacctgtcctccatgtcctgctccagaactgctggccggaccttccgtgttcctgtttcctccaaagcctaaggacaccctgatgatcagcagaacccctgaagtgacctgcgtggtggtggatgtgtctcacgaggaccctgaagtgaagttcaattggtacgtggacggcgtggaagtgcacaacgccaagaccaagcctagagaggaacagtacaacagcacctacagagtggtgtccgtgctgaccgtgctgcaccaggattggctgaacggcaaagagtacaagtgcaaggtgtccaacaaggccctgcctgcccctatcgaaaagaccatcagcaaggccaagggccagcctagggaaccccaggtttacacactgcctccaagccgcgacgaactgaccaagaaccaggtgtccctgacctgcctcgtgaagggcttctacccttccgatatcgccgtggaatgggagagcaatggccagcctgagaacaactacaagacaacccctcctgtgctggacagcgacggctcattcttcctgtacagcaagctgaccgtggacaagtccagatggcagcagggcaacgtgttcagctgtagcgtgctgcacgaagccctgcacagccactacacccagaaaagcctgtctctgagccccggcaaatgataaggatccgatctggtactgcatgcacgcaatgctagctgcccctttcccgtcctgggtaccccgagtctcccccgacctcgggtcccaggtatgctcccacctccacctgccccactcaccacctctgctagttccagacacctcccaagcacgcagcaatgcagctcaaaacgcttagcctagccacacccccacgggaaacagcagtgattaacctttagcaataaacgaaagtttaactaagctatactaaccccagggttggtcaatttcgtgccagccacaccctcgagctagcaaaaaaaaaaaaaaaaaaaaaaaaaaaaaagcatatgactaaaaaaaaaaaaaaaaaaaaaaaaaaaaaaaaaaaaaaaaaaaaaaaaaaaaaaaaaaaaaaaaaaaaaa

SEQ ID NO: 1132 - RNA, 2114 nt, synthetic construct
  source 1..2114: mol_type = other RNA
agaataaactagtattcttctggtccccacagactcagagagaacccgccaccatggattggatctggcgcatcctgtttctcgtgggagctgccacaggcgcccactctcaagttcacctgacacagtctggccccgaagtgcggaagcctggcacaagcgtgaaggtgtcctgtaaagcccctggcaacaccctgaaaacctacgacctgcactgggtccgatctgtgcctggacaaggactgcagtggatgggctggattagccacgagggcgacaagaaagtgatcgtggaacggttcaaggccaaagtgaccatcgactgggacagaagcaccaacaccgcctacctgcagctgagcggactgacatctggcgataccgccgtgtactactgtgccaagggcagcaagcaccggctgagagattacgccctgtacgacgatgacggcgccctgaattgggccgtcgatgtggactacctgagcaacctggaattctggggccagggaacagccgtgacagtgtcttccggcggcggaggaagcggagggggaggctctggaggtggtggctctggtggcggaggctcaggcggtggcggatctgattttgtgctgacacagagccctcacagcctgagcgttacacctggcgagagcgccagcatcagctgcaagtctagccactctctgatccacggcgaccggaacaactacctggcttggtacgtgcagaagcccggcagatctcctcagctgctgatctacctggccagcagcagagctagcggcgtgccagatagattttctggcagcggcagcgacaaggatttcaccctgaagatctccagagtggaaaccgaggacgtgggcacctactactgtatgcagggcagagagagcccctggacatttggccagggcaccaaggtggacatcaaaggcggaggtggaagtggtggtggcggtagcggaggcggtgggtccggaggtggtggatctgaacctaagagcagcgacaagacccacacctgtcctccatgtcctgctccagaactgctgggcggaccttccgtgttcctgtttcctccaaagcctaaggacaccctgatgatcagcagaacccctgaagtgacctgcgtggtggtggatgtgtctcacgaggaccctgaagtgaagttcaattggtacgtggacggcgtggaagtgcacaacgccaagaccaagcctagagaggaacagtacaacagcacctacagagtggtgtccgtgctgaccgtgctgcaccaggattggctgaacggcaaagagtacaagtgcaaggtgtccaacaaggccctgcctgcccctgaggaaaagaccatcagcaaggccaagggccagcctagggaaccccaggtttacacactgcctccaagccgcgacgaactgaccaagaaccaggtgtccctgacctgcctcgtgaagggcttctacccttccgatatcgccgtggaatgggagagcaatggccagcctgagaacaactacaagacaacccctcctgtgctggacagcgacggctcattcttcctgtacagcaagctgaccgtggacaagtccagatggcagcagggcaacgtgttcagctgtagcgtgctgcacgaagccctgcacagccactacacccagaaaagcctgtctctgagccccggcaaatgataaggatccgatctggtactgcatgcacgcaatgctagctgcccctttcccgtcctgggtaccccgagtctcccccgacctcgggtcccaggtatgctcccacctccacctgccccactcaccacctctgctagttccagacacctcccaagcacgcagcaatgcagctcaaaacgcttagcctagccacacccccacgggaaacagcagtgattaacctttagcaataaacgaaagtttaactaagctatactaaccccagggttggtcaatttcgtgccagccacaccctcgagctagcaaaaaaaaaaaaaaaaaaaaaaaaaaaaaagcatatgactaaaaaaaaaaaaaaaaaaaaaaaaaaaaaaaaaaaaaaaaaaaaaaaaaaaaaaaaaaaaaaaaaaaaaa

SEQ ID NO: 1133 - RNA, 2114 nt, synthetic construct
  source 1..2114: mol_type = other RNA
agaataaactagtattcttctggtccccacagactcagagagaacccgccaccatggattggatctggcgcatcctgtttctcgtgggagctgccacaggcgcccactctcaagttcacctgacacagtctggccccgaagtgcggaagcctggcacaagcgtgaaggtgtcctgtaaagcccctggcaacaccctgaaaacctacgacctgcactgggtccgatctgtgcctggacaaggactgcagtggatgggctggattagccacgagggcgacaagaaagtgatcgtggaacggttcaaggccaaagtgaccatcgactgggacagaagcaccaacaccgcctacctgcagctgagcggactgacatctggcgataccgccgtgtactactgtgccaagggcagcaagcaccggctgagagattacgccctgtacgacgatgacggcgccctgaattgggccgtcgatgtggactacctgagcaacctggaattctggggccagggaacagccgtgacagtgtcttccggcggcggaggaagcggagggggaggctctggaggtggtggctctggtggcggaggctcaggcggtggcggatctgattttgtgctgacacagagccctcacagcctgagcgttacacctggcgagagcgccagcatcagctgcaagtctagccactctctgatccacggcgaccggaacaactacctggcttggtacgtgcagaagcccggcagatctcctcagctgctgatctacctggccagcagcagagctagcggcgtgccagatagattttctggcagcggcagcgacaaggatttcaccctgaagatctccagagtggaaaccgaggacgtgggcacctactactgtatgcagggcagagagagcccctggacatttggccagggcaccaaggtggacatcaaaggcggaggtggaagtggtggtggcggtagcggaggcggtgggtccggaggtggtggatctgaacctaagagcagcgacaagacccacacctgtcctccatgtcctgctccagaactgctcggcggaccttccgtgttcctgtttcctccaaagcctaaggacaccctgatgatcagcagaacccctgaagtgacctgcgtggtggtggatgtgtctcacgaggaccccgaagtgaagttcaattggtacgtggacggcgtggaagtgcacaacgccaagaccaagcctagagaggaacagtacaacagcacctacagagtggtgtccgtgctgacagtgctgcaccaggattggctgaacggcaaagagtacaagtgcaaggtgtccaacaaggccctgcctgctcctatcgagaaaaccatcagcaaggccaagggccagcctcgcgaacctcaagtctgtacactgcctcctagccgcgacgaactgaccaagaaccaggtgtccctgagctgcgccgtgaagggcttttacccttccgatatcgccgtggaatgggagagcaatggccagcctgagaacaactacaagacaacccctcctgtgctggacagcgacggctcattcttcctggtgtccaagctgacagtggacaagagcagatggcagcagggcaacgtgttcagctgcagcgtgctgcatgaagccctgcacagccactacacccagaagtccctgtctctgagccccggcaagtgataaggatccgatctggtactgcatgcacgcaatgctagctgcccctttcccgtcctgggtaccccgagtctcccccgacctcgggtcccaggtatgctcccacctccacctgccccactcaccacctctgctagttccagacacctcccaagcacgcagcaatgcagctcaaaacgcttagcctagccacacccccacgggaaacagcagtgattaacctttagcaataaacgaaagtttaactaagctatactaaccccagggttggtcaatttcgtgccagccacaccctcgagctagcaaaaaaaaaaaaaaaaaaaaaaaaaaaaaagcatatgactaaaaaaaaaaaaaaaaaaaaaaaaaaaaaaaaaaaaaaaaaaaaaaaaaaaaaaaaaaaaaaaaaaaaaa

SEQ ID NO: 1134 - RNA, 2114 nt, synthetic construct
  source 1..2114: mol_type = other RNA
agaataaactagtattcttctggtccccacagactcagagagaacccgccaccatggattggatctggcgcatcctgtttctcgtgggagctgccacaggcgcccactctcaagttcacctgacacagtctggccccgaagtgcggaagcctggcacaagcgtgaaggtgtcctgtaaagcccctggcaacaccctgaaaacctacgacctgcactgggtccgatctgtgcctggacaaggactgcagtggatgggctggattagccacgagggcgacaagaaagtgatcgtggaacggttcaaggccaaagtgaccatcgactgggacagaagcaccaacaccgcctacctgcagctgagcggactgacatctggcgataccgccgtgtactactgtgccaagggcagcaagcaccggctgagagattacgccctgtacgacgatgacggcgccctgaattgggccgtcgatgtggactacctgagcaacctggaattctggggccagggaacagccgtgacagtgtcttccggcggcggaggaagcggagggggaggctctggaggtggtggctctggtggcggaggctcaggcggtggcggatctgattttgtgctgacacagagccctcacagcctgagcgttacacctggcgagagcgccagcatcagctgcaagtctagccactctctgatccacggcgaccggaacaactacctggcttggtacgtgcagaagcccggcagatctcctcagctgctgatctacctggccagcagcagagctagcggcgtgccagatagattttctggcagcggcagcgacaaggatttcaccctgaagatctccagagtggaaaccgaggacgtgggcacctactactgtatgcagggcagagagagcccctggacatttggccagggcaccaaggtggacatcaaaggcggaggtggaagtggtggtggcggtagcggaggcggtgggtccggaggtggtggatctgaacctaagagcagcgacaagacccacacctgtcctccatgtcctgctccagaactgctggccggaccttccgtgttcctgtttcctccaaagcctaaggacaccctgatgatcagcagaacccctgaagtgacctgcgtggtggtggatgtgtctcacgaggaccccgaagtgaagttcaattggtacgtggacggcgtggaagtgcacaatgccaagaccaagcctagagaggaacagtacaacagcacctacagagtggtgtccgtgctgaccgtgctgcaccaggattggctgaacggcaaagagtacaagtgcaaggtgtccaacaaggccctgcctctgcctgaggaaaagaccatcagcaaggccaagggccagcctcgcgaacctcaagtctgtacactgcctcctagccgcgacgaactgaccaagaaccaggtgtccctgagctgcgccgtgaagggcttttacccttccgatatcgccgtggaatgggagagcaatggccagcctgagaacaactacaagacaacccctcctgtgctggacagcgacggctcattcttcctggtgtccaagctgacagtggacaagagcagatggcagcagggcaacgtgttcagctgcagcgtgctgcatgaagccctgcacagccactacacccagaagtccctgtctctgagccccggcaagtgataaggatccgatctggtactgcatgcacgcaatgctagctgcccctttcccgtcctgggtaccccgagtctcccccgacctcgggtcccaggtatgctcccacctccacctgccccactcaccacctctgctagttccagacacctcccaagcacgcagcaatgcagctcaaaacgcttagcctagccacacccccacgggaaacagcagtgattaacctttagcaataaacgaaagtttaactaagctatactaaccccagggttggtcaatttcgtgccagccacaccctcgagctagcaaaaaaaaaaaaaaaaaaaaaaaaaaaaaagcatatgactaaaaaaaaaaaaaaaaaaaaaaaaaaaaaaaaaaaaaaaaaaaaaaaaaaaaaaaaaaaaaaaaaaaaaa

SEQ ID NO: 1135 - RNA, 2114 nt, synthetic construct
  source 1..2114: mol_type = other RNA
agaataaactagtattcttctggtccccacagactcagagagaacccgccaccatggattggatctggcgcatcctgtttctcgtgggagctgccacaggcgcccactctcaagttcacctgacacagtctggccccgaagtgcggaagcctggcacaagcgtgaaggtgtcctgtaaagcccctggcaacaccctgaaaacctacgacctgcactgggtccgatctgtgcctggacaaggactgcagtggatgggctggattagccacgagggcgacaagaaagtgatcgtggaacggttcaaggccaaagtgaccatcgactgggacagaagcaccaacaccgcctacctgcagctgagcggactgacatctggcgataccgccgtgtactactgtgccaagggcagcaagcaccggctgagagattacgccctgtacgacgatgacggcgccctgaattgggccgtcgatgtggactacctgagcaacctggaattctggggccagggaacagccgtgacagtgtcttccggcggcggaggaagcggagggggaggctctggaggtggtggctctggtggcggaggctcaggcggtggcggatctgattttgtgctgacacagagccctcacagcctgagcgttacacctggcgagagcgccagcatcagctgcaagtctagccactctctgatccacggcgaccggaacaactacctggcttggtacgtgcagaagcccggcagatctcctcagctgctgatctacctggccagcagcagagctagcggcgtgccagatagattttctggcagcggcagcgacaaggatttcaccctgaagatctccagagtggaaaccgaggacgtgggcacctactactgtatgcagggcagagagagcccctggacatttggccagggcaccaaggtggacatcaaaggcggaggtggaagtggtggtggcggtagcggaggcggtgggtccggaggtggtggatctgaacctaagagcagcgacaagacccacacctgtcctccatgtcctgctccagaactgctggccggaccttccgtgttcctgtttcctccaaagcctaaggacaccctgatgatcagcagaacccctgaagtgacctgcgtggtggtggatgtgtctcacgaggaccctgaagtgaagttcaattggtacgtggacggcgtggaagtgcacaacgccaagaccaagcctagagaggaacagtacaacagcacctacagagtggtgtccgtgctgaccgtgctgcaccaggattggctgaacggcaaagagtacaagtgcaaggtgtccaacaaggccctgcctgcccctgaggaaaagaccatcagcaaggccaagggccagcctcgcgaacctcaagtctgtacactgcctcctagccgcgacgaactgaccaagaaccaggtgtccctgagctgcgccgtgaagggcttttacccttccgatatcgccgtggaatgggagagcaatggccagcctgagaacaactacaagacaacccctcctgtgctggacagcgacggctcattcttcctggtgtccaagctgacagtggacaagagcagatggcagcagggcaacgtgttcagctgcagcgtgctgcatgaagccctgcacagccactacacccagaagtccctgtctctgagccccggcaagtgataaggatccgatctggtactgcatgcacgcaatgctagctgcccctttcccgtcctgggtaccccgagtctcccccgacctcgggtcccaggtatgctcccacctccacctgccccactcaccacctctgctagttccagacacctcccaagcacgcagcaatgcagctcaaaacgcttagcctagccacacccccacgggaaacagcagtgattaacctttagcaataaacgaaagtttaactaagctatactaaccccagggttggtcaatttcgtgccagccacaccctcgagctagcaaaaaaaaaaaaaaaaaaaaaaaaaaaaaagcatatgactaaaaaaaaaaaaaaaaaaaaaaaaaaaaaaaaaaaaaaaaaaaaaaaaaaaaaaaaaaaaaaaaaaaaaa

SEQ ID NO: 1136 - RNA, 2114 nt, synthetic construct
  source 1..2114: mol_type = other RNA
agaataaactagtattcttctggtccccacagactcagagagaacccgccaccatggattggatctggcgcatcctgtttctcgtgggagctgccacaggcgcccactctcaagttcacctgacacagtctggccccgaagtgcggaagcctggcacaagcgtgaaggtgtcctgtaaagcccctggcaacaccctgaaaacctacgacctgcactgggtccgatctgtgcctggacaaggactgcagtggatgggctggattagccacgagggcgacaagaaagtgatcgtggaacggttcaaggccaaagtgaccatcgactgggacagaagcaccaacaccgcctacctgcagctgagcggactgacatctggcgataccgccgtgtactactgtgccaagggcagcaagcaccggctgagagattacgccctgtacgacgatgacggcgccctgaattgggccgtcgatgtggactacctgagcaacctggaattctggggccagggaacagccgtgacagtgtcttccggcggcggaggaagcggagggggaggctctggaggtggtggctctggtggcggaggctcaggcggtggcggatctgattttgtgctgacacagagccctcacagcctgagcgttacacctggcgagagcgccagcatcagctgcaagtctagccactctctgatccacggcgaccggaacaactacctggcttggtacgtgcagaagcccggcagatctcctcagctgctgatctacctggccagcagcagagctagcggcgtgccagatagattttctggcagcggcagcgacaaggatttcaccctgaagatctccagagtggaaaccgaggacgtgggcacctactactgtatgcagggcagagagagcccctggacatttggccagggcaccaaggtggacatcaaaggcggaggtggaagtggtggtggcggtagcggaggcggtgggtccggaggtggtggatctgaacctaagagcagcgacaagacccacacctgtcctccatgtcctgctccagaactgctggccggaccttccgtgttcctgtttcctccaaagcctaaggacaccctgatgatcagcagaacccctgaagtgacctgcgtggtggtggatgtgtctcacgaggaccctgaagtgaagttcaattggtacgtggacggcgtggaagtgcacaacgccaagaccaagcctagagaggaacagtacaacagcacctacagagtggtgtccgtgctgaccgtgctgcaccaggattggctgaacggcaaagagtacaagtgcaaggtgtccaacaaggccctgcctgcccctatcgaaaagaccatcagcaaggccaagggccagcctcgcgaacctcaagtctgtacactgcctcctagccgcgacgaactgaccaagaaccaggtgtccctgagctgcgccgtgaagggcttttacccttccgatatcgccgtggaatgggagagcaatggccagcctgagaacaactacaagacaacccctcctgtgctggacagcgacggctcattcttcctggtgtccaagctgacagtggacaagagcagatggcagcagggcaacgtgttcagctgcagcgtgctgcatgaagccctgcacagccactacacccagaagtccctgtctctgagccccggcaagtgataaggatccgatctggtactgcatgcacgcaatgctagctgcccctttcccgtcctgggtaccccgagtctcccccgacctcgggtcccaggtatgctcccacctccacctgccccactcaccacctctgctagttccagacacctcccaagcacgcagcaatgcagctcaaaacgcttagcctagccacacccccacgggaaacagcagtgattaacctttagcaataaacgaaagtttaactaagctatactaaccccagggttggtcaatttcgtgccagccacaccctcgagctagcaaaaaaaaaaaaaaaaaaaaaaaaaaaaaagcatatgactaaaaaaaaaaaaaaaaaaaaaaaaaaaaaaaaaaaaaaaaaaaaaaaaaaaaaaaaaaaaaaaaaaaaaa

SEQ ID NO: 1137 - RNA, 2114 nt, synthetic construct
  source 1..2114: mol_type = other RNA
agaataaactagtattcttctggtccccacagactcagagagaacccgccaccatggattggatctggcgcatcctgtttctcgtgggagctgccacaggcgcccactctcaagttcacctgacacagtctggccccgaagtgcggaagcctggcacaagcgtgaaggtgtcctgtaaagcccctggcaacaccctgaaaacctacgacctgcactgggtccgatctgtgcctggacaaggactgcagtggatgggctggattagccacgagggcgacaagaaagtgatcgtggaacggttcaaggccaaagtgaccatcgactgggacagaagcaccaacaccgcctacctgcagctgagcggactgacatctggcgataccgccgtgtactactgtgccaagggcagcaagcaccggctgagagattacgccctgtacgacgatgacggcgccctgaattgggccgtcgatgtggactacctgagcaacctggaattctggggccagggaacagccgtgacagtgtcttccggcggcggaggaagcggagggggaggctctggaggtggtggctctggtggcggaggctcaggcggtggcggatctgattttgtgctgacacagagccctcacagcctgagcgttacacctggcgagagcgccagcatcagctgcaagtctagccactctctgatccacggcgaccggaacaactacctggcttggtacgtgcagaagcccggcagatctcctcagctgctgatctacctggccagcagcagagctagcggcgtgccagatagattttctggcagcggcagcgacaaggatttcaccctgaagatctccagagtggaaaccgaggacgtgggcacctactactgtatgcagggcagagagagcccctggacatttggccagggcaccaaggtggacatcaaaggcggaggtggaagtggtggtggcggtagcggaggcggtgggtccggaggtggtggatctgaacctaagagcagcgacaagacccacacctgtcctccatgtcctgctccagaactgctgggcggaccttccgtgttcctgtttcctccaaagcctaaggacaccctgatgatcagcagaacccctgaagtgacctgcgtggtggtggatgtgtctcacgaggaccctgaagtgaagttcaattggtacgtggacggcgtggaagtgcacaacgccaagaccaagcctagagaggaacagtacaacagcacctacagagtggtgtccgtgctgaccgtgctgcaccaggattggctgaacggcaaagagtacaagtgcaaggtgtccaacaaggccctgcctgcccctgaggaaaagaccatcagcaaggccaagggccagcctcgcgaacctcaagtctgtacactgcctcctagccgcgacgaactgaccaagaaccaggtgtccctgagctgcgccgtgaagggcttttacccttccgatatcgccgtggaatgggagagcaatggccagcctgagaacaactacaagacaacccctcctgtgctggacagcgacggctcattcttcctggtgtccaagctgacagtggacaagagcagatggcagcagggcaacgtgttcagctgcagcgtgctgcatgaagccctgcacagccactacacccagaagtccctgtctctgagccccggcaagtgataaggatccgatctggtactgcatgcacgcaatgctagctgcccctttcccgtcctgggtaccccgagtctcccccgacctcgggtcccaggtatgctcccacctccacctgccccactcaccacctctgctagttccagacacctcccaagcacgcagcaatgcagctcaaaacgcttagcctagccacacccccacgggaaacagcagtgattaacctttagcaataaacgaaagtttaactaagctatactaaccccagggttggtcaatttcgtgccagccacaccctcgagctagcaaaaaaaaaaaaaaaaaaaaaaaaaaaaaagcatatgactaaaaaaaaaaaaaaaaaaaaaaaaaaaaaaaaaaaaaaaaaaaaaaaaaaaaaaaaaaaaaaaaaaaaaa

SEQ ID NO: 1138 - RNA, 2114 nt, synthetic construct
  source 1..2114: mol_type = other RNA
agaataaactagtattcttctggtccccacagactcagagagaacccgccaccatggattggatctggcgcatcctgtttctcgtgggagctgccacaggcgcccactctcaagttcacctgacacagtctggccccgaagtgcggaagcctggcacaagcgtgaaggtgtcctgtaaagcccctggcaacaccctgaaaacctacgacctgcactgggtccgatctgtgcctggacaaggactgcagtggatgggctggattagccacgagggcgacaagaaagtgatcgtggaacggttcaaggccaaagtgaccatcgactgggacagaagcaccaacaccgcctacctgcagctgagcggactgacatctggcgataccgccgtgtactactgtgccaagggcagcaagcaccggctgagagattacgccctgtacgacgatgacggcgccctgaattgggccgtcgatgtggactacctgagcaacctggaattctggggccagggaacagccgtgacagtgtcttccggcggcggaggaagcggagggggaggctctggaggtggtggctctggtggcggaggctcaggcggtggcggatctgattttgtgctgacacagagccctcacagcctgagcgttacacctggcgagagcgccagcatcagctgcaagtctagccactctctgatccacggcgaccggaacaactacctggcttggtacgtgcagaagcccggcagatctcctcagctgctgatctacctggccagcagcagagctagcggcgtgccagatagattttctggcagcggcagcgacaaggatttcaccctgaagatctccagagtggaaaccgaggacgtgggcacctactactgtatgcagggcagagagagcccctggacatttggccagggcaccaaggtggacatcaaaggcggaggtggaagtggtggtggcggtagcggaggcggtgggtccggaggtggtggatctgaacctaagagcagcgacaagacccacacctgtcctccatgtcctgctccagaactgctcggcggaccttccgtgttcctgtttcctccaaagcctaaggacaccctgatgatcagcagaacccctgaagtgacctgcgtggtggtggatgtgtctcacgaggaccccgaagtgaagttcaattggtacgtggacggcgtggaagtgcacaacgccaagaccaagcctagagaggaacagtacaacagcacctacagagtggtgtccgtgctgacagtgctgcaccaggattggctgaacggcaaagagtacaagtgcaaggtgtccaacaaggccctgcctgctcctatcgagaaaaccatcagcaaggccaagggccagcctagggaaccccaggtttacaccctgcctccatgccgcgacgaactgaccaagaaccaggtgtccctgtggtgcctggtcaagggcttctacccttccgatatcgccgtggaatgggagagcaatggccagcctgagaacaactacaagacaacccctcctgtgctggacagcgacggctcattcttcctgtacagcaagctgacagtggacaagagcagatggcagcagggcaacgtgttcagctgcagcgtgctgcatgaagccctgcacagccactacacccagaagtccctgtctctgagccccggcaagtgataaggatccgatctggtactgcatgcacgcaatgctagctgcccctttcccgtcctgggtaccccgagtctcccccgacctcgggtcccaggtatgctcccacctccacctgccccactcaccacctctgctagttccagacacctcccaagcacgcagcaatgcagctcaaaacgcttagcctagccacacccccacgggaaacagcagtgattaacctttagcaataaacgaaagtttaactaagctatactaaccccagggttggtcaatttcgtgccagccacaccctcgagctagcaaaaaaaaaaaaaaaaaaaaaaaaaaaaaagcatatgactaaaaaaaaaaaaaaaaaaaaaaaaaaaaaaaaaaaaaaaaaaaaaaaaaaaaaaaaaaaaaaaaaaaaaa

SEQ ID NO: 1139 - RNA, 2114 nt, synthetic construct
  source 1..2114: mol_type = other RNA
agaataaactagtattcttctggtccccacagactcagagagaacccgccaccatggattggatctggcgcatcctgtttctcgtgggagctgccacaggcgcccactctcaagttcacctgacacagtctggccccgaagtgcggaagcctggcacaagcgtgaaggtgtcctgtaaagcccctggcaacaccctgaaaacctacgacctgcactgggtccgatctgtgcctggacaaggactgcagtggatgggctggattagccacgagggcgacaagaaagtgatcgtggaacggttcaaggccaaagtgaccatcgactgggacagaagcaccaacaccgcctacctgcagctgagcggactgacatctggcgataccgccgtgtactactgtgccaagggcagcaagcaccggctgagagattacgccctgtacgacgatgacggcgccctgaattgggccgtcgatgtggactacctgagcaacctggaattctggggccagggaacagccgtgacagtgtcttccggcggcggaggaagcggagggggaggctctggaggtggtggctctggtggcggaggctcaggcggtggcggatctgattttgtgctgacacagagccctcacagcctgagcgttacacctggcgagagcgccagcatcagctgcaagtctagccactctctgatccacggcgaccggaacaactacctggcttggtacgtgcagaagcccggcagatctcctcagctgctgatctacctggccagcagcagagctagcggcgtgccagatagattttctggcagcggcagcgacaaggatttcaccctgaagatctccagagtggaaaccgaggacgtgggcacctactactgtatgcagggcagagagagcccctggacatttggccagggcaccaaggtggacatcaaaggcggaggtggaagtggtggtggcggtagcggaggcggtgggtccggaggtggtggatctgaacctaagagcagcgacaagacccacacctgtcctccatgtcctgctccagaactgctggccggaccttccgtgttcctgtttcctccaaagcctaaggacaccctgatgatcagcagaacccctgaagtgacctgcgtggtggtggatgtgtctcacgaggaccccgaagtgaagttcaattggtacgtggacggcgtggaagtgcacaatgccaagaccaagcctagagaggaacagtacaacagcacctacagagtggtgtccgtgctgaccgtgctgcaccaggattggctgaacggcaaagagtacaagtgcaaggtgtccaacaaggccctgcctctgcctgaggaaaagaccatcagcaaggccaagggccagcctagggaaccccaggtttacaccctgcctccatgccgcgacgaactgaccaagaaccaggtgtccctgtggtgcctggtcaagggcttctacccttccgatatcgccgtggaatgggagagcaatggccagcctgagaacaactacaagacaacccctcctgtgctggacagcgacggctcattcttcctgtacagcaagctgacagtggacaagagcagatggcagcagggcaacgtgttcagctgcagcgtgctgcatgaagccctgcacagccactacacccagaagtccctgtctctgagccccggcaagtgataaggatccgatctggtactgcatgcacgcaatgctagctgcccctttcccgtcctgggtaccccgagtctcccccgacctcgggtcccaggtatgctcccacctccacctgccccactcaccacctctgctagttccagacacctcccaagcacgcagcaatgcagctcaaaacgcttagcctagccacacccccacgggaaacagcagtgattaacctttagcaataaacgaaagtttaactaagctatactaaccccagggttggtcaatttcgtgccagccacaccctcgagctagcaaaaaaaaaaaaaaaaaaaaaaaaaaaaaagcatatgactaaaaaaaaaaaaaaaaaaaaaaaaaaaaaaaaaaaaaaaaaaaaaaaaaaaaaaaaaaaaaaaaaaaaaa

SEQ ID NO: 1140 - RNA, 2114 nt, synthetic construct
  source 1..2114: mol_type = other RNA
agaataaactagtattcttctggtccccacagactcagagagaacccgccaccatggattggatctggcgcatcctgtttctcgtgggagctgccacaggcgcccactctcaagttcacctgacacagtctggccccgaagtgcggaagcctggcacaagcgtgaaggtgtcctgtaaagcccctggcaacaccctgaaaacctacgacctgcactgggtccgatctgtgcctggacaaggactgcagtggatgggctggattagccacgagggcgacaagaaagtgatcgtggaacggttcaaggccaaagtgaccatcgactgggacagaagcaccaacaccgcctacctgcagctgagcggactgacatctggcgataccgccgtgtactactgtgccaagggcagcaagcaccggctgagagattacgccctgtacgacgatgacggcgccctgaattgggccgtcgatgtggactacctgagcaacctggaattctggggccagggaacagccgtgacagtgtcttccggcggcggaggaagcggagggggaggctctggaggtggtggctctggtggcggaggctcaggcggtggcggatctgattttgtgctgacacagagccctcacagcctgagcgttacacctggcgagagcgccagcatcagctgcaagtctagccactctctgatccacggcgaccggaacaactacctggcttggtacgtgcagaagcccggcagatctcctcagctgctgatctacctggccagcagcagagctagcggcgtgccagatagattttctggcagcggcagcgacaaggatttcaccctgaagatctccagagtggaaaccgaggacgtgggcacctactactgtatgcagggcagagagagcccctggacatttggccagggcaccaaggtggacatcaaaggcggaggtggaagtggtggtggcggtagcggaggcggtgggtccggaggtggtggatctgaacctaagagcagcgacaagacccacacctgtcctccatgtcctgctccagaactgctggccggaccttccgtgttcctgtttcctccaaagcctaaggacaccctgatgatcagcagaacccctgaagtgacctgcgtggtggtggatgtgtctcacgaggaccctgaagtgaagttcaattggtacgtggacggcgtggaagtgcacaacgccaagaccaagcctagagaggaacagtacaacagcacctacagagtggtgtccgtgctgaccgtgctgcaccaggattggctgaacggcaaagagtacaagtgcaaggtgtccaacaaggccctgcctgcccctgaggaaaagaccatcagcaaggccaagggccagcctagggaaccccaggtttacaccctgcctccatgccgcgacgaactgaccaagaaccaggtgtccctgtggtgcctggtcaagggcttctacccttccgatatcgccgtggaatgggagagcaatggccagcctgagaacaactacaagacaacccctcctgtgctggacagcgacggctcattcttcctgtacagcaagctgacagtggacaagagcagatggcagcagggcaacgtgttcagctgcagcgtgctgcatgaagccctgcacagccactacacccagaagtccctgtctctgagccccggcaagtgataaggatccgatctggtactgcatgcacgcaatgctagctgcccctttcccgtcctgggtaccccgagtctcccccgacctcgggtcccaggtatgctcccacctccacctgccccactcaccacctctgctagttccagacacctcccaagcacgcagcaatgcagctcaaaacgcttagcctagccacacccccacgggaaacagcagtgattaacctttagcaataaacgaaagtttaactaagctatactaaccccagggttggtcaatttcgtgccagccacaccctcgagctagcaaaaaaaaaaaaaaaaaaaaaaaaaaaaaagcatatgactaaaaaaaaaaaaaaaaaaaaaaaaaaaaaaaaaaaaaaaaaaaaaaaaaaaaaaaaaaaaaaaaaaaaaa

SEQ ID NO: 1141 - RNA, 2114 nt, synthetic construct
  source 1..2114: mol_type = other RNA
agaataaactagtattcttctggtccccacagactcagagagaacccgccaccatggattggatctggcgcatcctgtttctcgtgggagctgccacaggcgcccactctcaagttcacctgacacagtctggccccgaagtgcggaagcctggcacaagcgtgaaggtgtcctgtaaagcccctggcaacaccctgaaaacctacgacctgcactgggtccgatctgtgcctggacaaggactgcagtggatgggctggattagccacgagggcgacaagaaagtgatcgtggaacggttcaaggccaaagtgaccatcgactgggacagaagcaccaacaccgcctacctgcagctgagcggactgacatctggcgataccgccgtgtactactgtgccaagggcagcaagcaccggctgagagattacgccctgtacgacgatgacggcgccctgaattgggccgtcgatgtggactacctgagcaacctggaattctggggccagggaacagccgtgacagtgtcttccggcggcggaggaagcggagggggaggctctggaggtggtggctctggtggcggaggctcaggcggtggcggatctgattttgtgctgacacagagccctcacagcctgagcgttacacctggcgagagcgccagcatcagctgcaagtctagccactctctgatccacggcgaccggaacaactacctggcttggtacgtgcagaagcccggcagatctcctcagctgctgatctacctggccagcagcagagctagcggcgtgccagatagattttctggcagcggcagcgacaaggatttcaccctgaagatctccagagtggaaaccgaggacgtgggcacctactactgtatgcagggcagagagagcccctggacatttggccagggcaccaaggtggacatcaaaggcggaggtggaagtggtggtggcggtagcggaggcggtgggtccggaggtggtggatctgaacctaagagcagcgacaagacccacacctgtcctccatgtcctgctccagaactgctggccggaccttccgtgttcctgtttcctccaaagcctaaggacaccctgatgatcagcagaacccctgaagtgacctgcgtggtggtggatgtgtctcacgaggaccctgaagtgaagttcaattggtacgtggacggcgtggaagtgcacaacgccaagaccaagcctagagaggaacagtacaacagcacctacagagtggtgtccgtgctgaccgtgctgcaccaggattggctgaacggcaaagagtacaagtgcaaggtgtccaacaaggccctgcctgcccctatcgaaaagaccatcagcaaggccaagggccagcctagggaaccccaggtttacaccctgcctccatgccgcgacgaactgaccaagaaccaggtgtccctgtggtgcctggtcaagggcttctacccttccgatatcgccgtggaatgggagagcaatggccagcctgagaacaactacaagacaacccctcctgtgctggacagcgacggctcattcttcctgtacagcaagctgacagtggacaagagcagatggcagcagggcaacgtgttcagctgcagcgtgctgcatgaagccctgcacagccactacacccagaagtccctgtctctgagccccggcaagtgataaggatccgatctggtactgcatgcacgcaatgctagctgcccctttcccgtcctgggtaccccgagtctcccccgacctcgggtcccaggtatgctcccacctccacctgccccactcaccacctctgctagttccagacacctcccaagcacgcagcaatgcagctcaaaacgcttagcctagccacacccccacgggaaacagcagtgattaacctttagcaataaacgaaagtttaactaagctatactaaccccagggttggtcaatttcgtgccagccacaccctcgagctagcaaaaaaaaaaaaaaaaaaaaaaaaaaaaaagcatatgactaaaaaaaaaaaaaaaaaaaaaaaaaaaaaaaaaaaaaaaaaaaaaaaaaaaaaaaaaaaaaaaaaaaaaa

SEQ ID NO: 1142 - RNA, 2114 nt, synthetic construct
  source 1..2114: mol_type = other RNA
agaataaactagtattcttctggtccccacagactcagagagaacccgccaccatggattggatctggcgcatcctgtttctcgtgggagctgccacaggcgcccactctcaagttcacctgacacagtctggccccgaagtgcggaagcctggcacaagcgtgaaggtgtcctgtaaagcccctggcaacaccctgaaaacctacgacctgcactgggtccgatctgtgcctggacaaggactgcagtggatgggctggattagccacgagggcgacaagaaagtgatcgtggaacggttcaaggccaaagtgaccatcgactgggacagaagcaccaacaccgcctacctgcagctgagcggactgacatctggcgataccgccgtgtactactgtgccaagggcagcaagcaccggctgagagattacgccctgtacgacgatgacggcgccctgaattgggccgtcgatgtggactacctgagcaacctggaattctggggccagggaacagccgtgacagtgtcttccggcggcggaggaagcggagggggaggctctggaggtggtggctctggtggcggaggctcaggcggtggcggatctgattttgtgctgacacagagccctcacagcctgagcgttacacctggcgagagcgccagcatcagctgcaagtctagccactctctgatccacggcgaccggaacaactacctggcttggtacgtgcagaagcccggcagatctcctcagctgctgatctacctggccagcagcagagctagcggcgtgccagatagattttctggcagcggcagcgacaaggatttcaccctgaagatctccagagtggaaaccgaggacgtgggcacctactactgtatgcagggcagagagagcccctggacatttggccagggcaccaaggtggacatcaaaggcggaggtggaagtggtggtggcggtagcggaggcggtgggtccggaggtggtggatctgaacctaagagcagcgacaagacccacacctgtcctccatgtcctgctccagaactgctgggcggaccttccgtgttcctgtttcctccaaagcctaaggacaccctgatgatcagcagaacccctgaagtgacctgcgtggtggtggatgtgtctcacgaggaccctgaagtgaagttcaattggtacgtggacggcgtggaagtgcacaacgccaagaccaagcctagagaggaacagtacaacagcacctacagagtggtgtccgtgctgaccgtgctgcaccaggattggctgaacggcaaagagtacaagtgcaaggtgtccaacaaggccctgcctgcccctgaggaaaagaccatcagcaaggccaagggccagcctagggaaccccaggtttacaccctgcctccatgccgcgacgaactgaccaagaaccaggtgtccctgtggtgcctggtcaagggcttctacccttccgatatcgccgtggaatgggagagcaatggccagcctgagaacaactacaagacaacccctcctgtgctggacagcgacggctcattcttcctgtacagcaagctgacagtggacaagagcagatggcagcagggcaacgtgttcagctgcagcgtgctgcatgaagccctgcacagccactacacccagaagtccctgtctctgagccccggcaagtgataaggatccgatctggtactgcatgcacgcaatgctagctgcccctttcccgtcctgggtaccccgagtctcccccgacctcgggtcccaggtatgctcccacctccacctgccccactcaccacctctgctagttccagacacctcccaagcacgcagcaatgcagctcaaaacgcttagcctagccacacccccacgggaaacagcagtgattaacctttagcaataaacgaaagtttaactaagctatactaaccccagggttggtcaatttcgtgccagccacaccctcgagctagcaaaaaaaaaaaaaaaaaaaaaaaaaaaaaagcatatgactaaaaaaaaaaaaaaaaaaaaaaaaaaaaaaaaaaaaaaaaaaaaaaaaaaaaaaaaaaaaaaaaaaaaaa

SEQ ID NO: 1143 - RNA, 2114 nt, synthetic construct
  source 1..2114: mol_type = other RNA
agaataaactagtattcttctggtccccacagactcagagagaacccgccaccatggattggatctggcgcatcctgtttctcgtgggagctgccacaggcgcccacagcgattttgtgctgacacagtctccccacagcctgagcgttacacctggcgagtctgccagcatcagctgcaagtctagccactctctgatccacggcgaccggaacaactacctggcttggtacgtgcagaagcccggcagatctcctcagctgctgatctacctggccagcagcagagcttctggcgtgcccgatagattttctggcagcggcagcgacaaggacttcaccctgaagatctccagagtggaaaccgaggacgtgggcacctactactgtatgcagggcagagagagcccctggacatttggccagggcaccaaggtggacatcaaaggcggcggaggaagcggaggcggaggttctggtggtggtggctctggtggcggaggctcaggcggtggcggatctcaagttcatctgacacagagcggccctgaagtgcggaagcctggcacaagcgtgaaggtgtcctgtaaagcccctggcaacaccctgaaaacctacgacctgcactgggtccgatctgtgcctggacagggactgcaatggatgggctggattagccacgagggcgacaagaaagtgatcgtggaacggttcaaggccaaagtgaccatcgactgggacagaagcaccaacaccgcctacctgcagctgagcggactgacatctggcgataccgccgtgtactactgtgccaagggcagcaagcaccggctgagagattacgccctgtacgacgatgacggcgccctgaattgggccgtcgatgtggactacctgagcaacctggaattctggggccagggaacagccgtgacagtgtcttccggcggaggtggaagtggtggcggcggatctggcggcggtgggtccggaggtggtggatctgaacctaagagcagcgacaagacccacacctgtcctccatgtcctgctccagaactgctcggcggaccttccgtgttcctgtttcctccaaagcctaaggacaccctgatgatcagcagaacccctgaagtgacctgcgtggtggtggatgtgtctcacgaggaccccgaagtgaagttcaattggtacgtggacggcgtggaagtgcacaacgccaagaccaagcctagagaggaacagtacaacagcacctacagagtggtgtccgtgctgacagtgctgcaccaggattggctgaacggcaaagagtacaagtgcaaggtgtccaacaaggccctgcctgctcctatcgagaaaaccatcagcaaggccaagggccagcctagggaaccccaggtttacacactgcctccaagccgcgaggaaatgaccaagaaccaggtgtccctgacctgcctcgtgaagggcttctacccttccgatatcgccgtggaatgggagagcaatggccagcctgagaacaactacaagacaacccctcctgtgctggacagcgacggctcattcttcctgtacagcaagctgactgtggataagtcccggtggcagcagggcaacgtgttcagctgttctgtgatgcacgaagccctgcacaaccactacacccagaaaagcctgtctctgagccccggcaagtgataaggatccgatctggtactgcatgcacgcaatgctagctgcccctttcccgtcctgggtaccccgagtctcccccgacctcgggtcccaggtatgctcccacctccacctgccccactcaccacctctgctagttccagacacctcccaagcacgcagcaatgcagctcaaaacgcttagcctagccacacccccacgggaaacagcagtgattaacctttagcaataaacgaaagtttaactaagctatactaaccccagggttggtcaatttcgtgccagccacaccctcgagctagcaaaaaaaaaaaaaaaaaaaaaaaaaaaaaagcatatgactaaaaaaaaaaaaaaaaaaaaaaaaaaaaaaaaaaaaaaaaaaaaaaaaaaaaaaaaaaaaaaaaaaaaaa

SEQ ID NO: 1144 - RNA, 2114 nt, synthetic construct
  source 1..2114: mol_type = other RNA
agaataaactagtattcttctggtccccacagactcagagagaacccgccaccatggattggatctggcgcatcctgtttctcgtgggagctgccacaggcgcccacagcgattttgtgctgacacagtctccccacagcctgagcgttacacctggcgagtctgccagcatcagctgcaagtctagccactctctgatccacggcgaccggaacaactacctggcttggtacgtgcagaagcccggcagatctcctcagctgctgatctacctggccagcagcagagcttctggcgtgcccgatagattttctggcagcggcagcgacaaggacttcaccctgaagatctccagagtggaaaccgaggacgtgggcacctactactgtatgcagggcagagagagcccctggacatttggccagggcaccaaggtggacatcaaaggcggcggaggaagcggaggcggaggttctggtggtggtggctctggtggcggaggctcaggcggtggcggatctcaagttcatctgacacagagcggccctgaagtgcggaagcctggcacaagcgtgaaggtgtcctgtaaagcccctggcaacaccctgaaaacctacgacctgcactgggtccgatctgtgcctggacagggactgcaatggatgggctggattagccacgagggcgacaagaaagtgatcgtggaacggttcaaggccaaagtgaccatcgactgggacagaagcaccaacaccgcctacctgcagctgagcggactgacatctggcgataccgccgtgtactactgtgccaagggcagcaagcaccggctgagagattacgccctgtacgacgatgacggcgccctgaattgggccgtcgatgtggactacctgagcaacctggaattctggggccagggaacagccgtgacagtgtcttccggcggaggtggaagtggtggcggcggatctggcggcggtgggtccggaggtggtggatctgaacctaagagcagcgacaagacccacacctgtcctccatgtcctgctccagaactgctcggcggaccttccgtgttcctgtttcctccaaagcctaaggacaccctgatgatcagcagaacccctgaagtgacctgcgtggtggtggatgtgtctcacgaggaccccgaagtgaagttcaattggtacgtggacggcgtggaagtgcacaacgccaagaccaagcctagagaggaacagtacaacagcacctacagagtggtgtccgtgctgacagtgctgcaccaggattggctgaacggcaaagagtacaagtgcaaggtgtccaacaaggccctgcctgctcctatcgagaaaaccatcagcaaggccaagggccagcctagggaaccccaggtttacacactgcctccaagccgcgaggaaatgaccaagaaccaggtgtccctgacctgcctcgtgaagggcttctacccttccgatatcgccgtggaatgggagagcaatggccagcctgagaacaactacaagacaacccctcctgtgctggacagcgacggctcattcttcctgtacagcaagctgaccgtggacaagtccagatggcagcagggcaacgtgttcagctgtagcgtgctgcacgaagccctgcacagccactacacccagaaaagcctgtctctgagccccggcaaatgataaggatccgatctggtactgcatgcacgcaatgctagctgcccctttcccgtcctgggtaccccgagtctcccccgacctcgggtcccaggtatgctcccacctccacctgccccactcaccacctctgctagttccagacacctcccaagcacgcagcaatgcagctcaaaacgcttagcctagccacacccccacgggaaacagcagtgattaacctttagcaataaacgaaagtttaactaagctatactaaccccagggttggtcaatttcgtgccagccacaccctcgagctagcaaaaaaaaaaaaaaaaaaaaaaaaaaaaaagcatatgactaaaaaaaaaaaaaaaaaaaaaaaaaaaaaaaaaaaaaaaaaaaaaaaaaaaaaaaaaaaaaaaaaaaaaa

SEQ ID NO: 1145 - RNA, 2114 nt, synthetic construct
  source 1..2114: mol_type = other RNA
agaataaactagtattcttctggtccccacagactcagagagaacccgccaccatggattggatctggcgcatcctgtttctcgtgggagctgccacaggcgcccacagcgattttgtgctgacacagtctccccacagcctgagcgttacacctggcgagtctgccagcatcagctgcaagtctagccactctctgatccacggcgaccggaacaactacctggcttggtacgtgcagaagcccggcagatctcctcagctgctgatctacctggccagcagcagagcttctggcgtgcccgatagattttctggcagcggcagcgacaaggacttcaccctgaagatctccagagtggaaaccgaggacgtgggcacctactactgtatgcagggcagagagagcccctggacatttggccagggcaccaaggtggacatcaaaggcggcggaggaagcggaggcggaggttctggtggtggtggctctggtggcggaggctcaggcggtggcggatctcaagttcatctgacacagagcggccctgaagtgcggaagcctggcacaagcgtgaaggtgtcctgtaaagcccctggcaacaccctgaaaacctacgacctgcactgggtccgatctgtgcctggacagggactgcaatggatgggctggattagccacgagggcgacaagaaagtgatcgtggaacggttcaaggccaaagtgaccatcgactgggacagaagcaccaacaccgcctacctgcagctgagcggactgacatctggcgataccgccgtgtactactgtgccaagggcagcaagcaccggctgagagattacgccctgtacgacgatgacggcgccctgaattgggccgtcgatgtggactacctgagcaacctggaattctggggccagggaacagccgtgacagtgtcttccggcggaggtggaagtggtggcggcggatctggcggcggtgggtccggaggtggtggatctgaacctaagagcagcgacaagacccacacctgtcctccatgtcctgctccagaactgctggccggaccttccgtgttcctgtttcctccaaagcctaaggacaccctgatgatcagcagaacccctgaagtgacctgcgtggtggtggatgtgtctcacgaggaccccgaagtgaagttcaattggtacgtggacggcgtggaagtgcacaatgccaagaccaagcctagagaggaacagtacaacagcacctacagagtggtgtccgtgctgaccgtgctgcaccaggattggctgaacggcaaagagtacaagtgcaaggtgtccaacaaggccctgcctctgcctgaggaaaagaccatcagcaaggccaagggccagcctagggaaccccaggtttacacactgcctccaagccgcgaggaaatgaccaagaaccaggtgtccctgacctgcctcgtgaagggcttctacccttccgatatcgccgtggaatgggagagcaatggccagcctgagaacaactacaagacaacccctcctgtgctggacagcgacggctcattcttcctgtacagcaagctgaccgtggacaagtccagatggcagcagggcaacgtgttcagctgtagcgtgctgcacgaagccctgcacagccactacacccagaaaagcctgtctctgagccccggcaaatgataaggatccgatctggtactgcatgcacgcaatgctagctgcccctttcccgtcctgggtaccccgagtctcccccgacctcgggtcccaggtatgctcccacctccacctgccccactcaccacctctgctagttccagacacctcccaagcacgcagcaatgcagctcaaaacgcttagcctagccacacccccacgggaaacagcagtgattaacctttagcaataaacgaaagtttaactaagctatactaaccccagggttggtcaatttcgtgccagccacaccctcgagctagcaaaaaaaaaaaaaaaaaaaaaaaaaaaaaagcatatgactaaaaaaaaaaaaaaaaaaaaaaaaaaaaaaaaaaaaaaaaaaaaaaaaaaaaaaaaaaaaaaaaaaaaaa

SEQ ID NO: 1146 - RNA, 2114 nt, synthetic construct
  source 1..2114: mol_type = other RNA
agaataaactagtattcttctggtccccacagactcagagagaacccgccaccatggattggatctggcgcatcctgtttctcgtgggagctgccacaggcgcccacagcgattttgtgctgacacagtctccccacagcctgagcgttacacctggcgagtctgccagcatcagctgcaagtctagccactctctgatccacggcgaccggaacaactacctggcttggtacgtgcagaagcccggcagatctcctcagctgctgatctacctggccagcagcagagcttctggcgtgcccgatagattttctggcagcggcagcgacaaggacttcaccctgaagatctccagagtggaaaccgaggacgtgggcacctactactgtatgcagggcagagagagcccctggacatttggccagggcaccaaggtggacatcaaaggcggcggaggaagcggaggcggaggttctggtggtggtggctctggtggcggaggctcaggcggtggcggatctcaagttcatctgacacagagcggccctgaagtgcggaagcctggcacaagcgtgaaggtgtcctgtaaagcccctggcaacaccctgaaaacctacgacctgcactgggtccgatctgtgcctggacagggactgcaatggatgggctggattagccacgagggcgacaagaaagtgatcgtggaacggttcaaggccaaagtgaccatcgactgggacagaagcaccaacaccgcctacctgcagctgagcggactgacatctggcgataccgccgtgtactactgtgccaagggcagcaagcaccggctgagagattacgccctgtacgacgatgacggcgccctgaattgggccgtcgatgtggactacctgagcaacctggaattctggggccagggaacagccgtgacagtgtcttccggcggaggtggaagtggtggcggcggatctggcggcggtgggtccggaggtggtggatctgaacctaagagcagcgacaagacccacacctgtcctccatgtcctgctccagaactgctggccggaccttccgtgttcctgtttcctccaaagcctaaggacaccctgatgatcagcagaacccctgaagtgacctgcgtggtggtggatgtgtctcacgaggaccctgaagtgaagttcaattggtacgtggacggcgtggaagtgcacaacgccaagaccaagcctagagaggaacagtacaacagcacctacagagtggtgtccgtgctgaccgtgctgcaccaggattggctgaacggcaaagagtacaagtgcaaggtgtccaacaaggccctgcctgcccctgaggaaaagaccatcagcaaggccaagggccagcctagggaaccccaggtttacacactgcctccaagccgcgaggaaatgaccaagaaccaggtgtccctgacctgcctcgtgaagggcttctacccttccgatatcgccgtggaatgggagagcaatggccagcctgagaacaactacaagacaacccctcctgtgctggacagcgacggctcattcttcctgtacagcaagctgaccgtggacaagtccagatggcagcagggcaacgtgttcagctgtagcgtgctgcacgaagccctgcacagccactacacccagaaaagcctgtctctgagccccggcaaatgataaggatccgatctggtactgcatgcacgcaatgctagctgcccctttcccgtcctgggtaccccgagtctcccccgacctcgggtcccaggtatgctcccacctccacctgccccactcaccacctctgctagttccagacacctcccaagcacgcagcaatgcagctcaaaacgcttagcctagccacacccccacgggaaacagcagtgattaacctttagcaataaacgaaagtttaactaagctatactaaccccagggttggtcaatttcgtgccagccacaccctcgagctagcaaaaaaaaaaaaaaaaaaaaaaaaaaaaaagcatatgactaaaaaaaaaaaaaaaaaaaaaaaaaaaaaaaaaaaaaaaaaaaaaaaaaaaaaaaaaaaaaaaaaaaaaa

SEQ ID NO: 1147 - RNA, 2114 nt, synthetic construct
  source 1..2114: mol_type = other RNA
agaataaactagtattcttctggtccccacagactcagagagaacccgccaccatggattggatctggcgcatcctgtttctcgtgggagctgccacaggcgcccacagcgattttgtgctgacacagtctccccacagcctgagcgttacacctggcgagtctgccagcatcagctgcaagtctagccactctctgatccacggcgaccggaacaactacctggcttggtacgtgcagaagcccggcagatctcctcagctgctgatctacctggccagcagcagagcttctggcgtgcccgatagattttctggcagcggcagcgacaaggacttcaccctgaagatctccagagtggaaaccgaggacgtgggcacctactactgtatgcagggcagagagagcccctggacatttggccagggcaccaaggtggacatcaaaggcggcggaggaagcggaggcggaggttctggtggtggtggctctggtggcggaggctcaggcggtggcggatctcaagttcatctgacacagagcggccctgaagtgcggaagcctggcacaagcgtgaaggtgtcctgtaaagcccctggcaacaccctgaaaacctacgacctgcactgggtccgatctgtgcctggacagggactgcaatggatgggctggattagccacgagggcgacaagaaagtgatcgtggaacggttcaaggccaaagtgaccatcgactgggacagaagcaccaacaccgcctacctgcagctgagcggactgacatctggcgataccgccgtgtactactgtgccaagggcagcaagcaccggctgagagattacgccctgtacgacgatgacggcgccctgaattgggccgtcgatgtggactacctgagcaacctggaattctggggccagggaacagccgtgacagtgtcttccggcggaggtggaagtggtggcggcggatctggcggcggtgggtccggaggtggtggatctgaacctaagagcagcgacaagacccacacctgtcctccatgtcctgctccagaactgctggccggaccttccgtgttcctgtttcctccaaagcctaaggacaccctgatgatcagcagaacccctgaagtgacctgcgtggtggtggatgtgtctcacgaggaccctgaagtgaagttcaattggtacgtggacggcgtggaagtgcacaacgccaagaccaagcctagagaggaacagtacaacagcacctacagagtggtgtccgtgctgaccgtgctgcaccaggattggctgaacggcaaagagtacaagtgcaaggtgtccaacaaggccctgcctgcccctatcgaaaagaccatcagcaaggccaagggccagcctagggaaccccaggtttacacactgcctccaagccgcgaggaaatgaccaagaaccaggtgtccctgacctgcctcgtgaagggcttctacccttccgatatcgccgtggaatgggagagcaatggccagcctgagaacaactacaagacaacccctcctgtgctggacagcgacggctcattcttcctgtacagcaagctgaccgtggacaagtccagatggcagcagggcaacgtgttcagctgtagcgtgctgcacgaagccctgcacagccactacacccagaaaagcctgtctctgagccccggcaaatgataaggatccgatctggtactgcatgcacgcaatgctagctgcccctttcccgtcctgggtaccccgagtctcccccgacctcgggtcccaggtatgctcccacctccacctgccccactcaccacctctgctagttccagacacctcccaagcacgcagcaatgcagctcaaaacgcttagcctagccacacccccacgggaaacagcagtgattaacctttagcaataaacgaaagtttaactaagctatactaaccccagggttggtcaatttcgtgccagccacaccctcgagctagcaaaaaaaaaaaaaaaaaaaaaaaaaaaaaagcatatgactaaaaaaaaaaaaaaaaaaaaaaaaaaaaaaaaaaaaaaaaaaaaaaaaaaaaaaaaaaaaaaaaaaaaaa

SEQ ID NO: 1148 - RNA, 2114 nt, synthetic construct
  source 1..2114: mol_type = other RNA
agaataaactagtattcttctggtccccacagactcagagagaacccgccaccatggattggatctggcgcatcctgtttctcgtgggagctgccacaggcgcccacagcgattttgtgctgacacagtctccccacagcctgagcgttacacctggcgagtctgccagcatcagctgcaagtctagccactctctgatccacggcgaccggaacaactacctggcttggtacgtgcagaagcccggcagatctcctcagctgctgatctacctggccagcagcagagcttctggcgtgcccgatagattttctggcagcggcagcgacaaggacttcaccctgaagatctccagagtggaaaccgaggacgtgggcacctactactgtatgcagggcagagagagcccctggacatttggccagggcaccaaggtggacatcaaaggcggcggaggaagcggaggcggaggttctggtggtggtggctctggtggcggaggctcaggcggtggcggatctcaagttcatctgacacagagcggccctgaagtgcggaagcctggcacaagcgtgaaggtgtcctgtaaagcccctggcaacaccctgaaaacctacgacctgcactgggtccgatctgtgcctggacagggactgcaatggatgggctggattagccacgagggcgacaagaaagtgatcgtggaacggttcaaggccaaagtgaccatcgactgggacagaagcaccaacaccgcctacctgcagctgagcggactgacatctggcgataccgccgtgtactactgtgccaagggcagcaagcaccggctgagagattacgccctgtacgacgatgacggcgccctgaattgggccgtcgatgtggactacctgagcaacctggaattctggggccagggaacagccgtgacagtgtcttccggcggaggtggaagtggtggcggcggatctggcggcggtgggtccggaggtggtggatctgaacctaagagcagcgacaagacccacacctgtcctccatgtcctgctccagaactgctgggcggaccttccgtgttcctgtttcctccaaagcctaaggacaccctgatgatcagcagaacccctgaagtgacctgcgtggtggtggatgtgtctcacgaggaccctgaagtgaagttcaattggtacgtggacggcgtggaagtgcacaacgccaagaccaagcctagagaggaacagtacaacagcacctacagagtggtgtccgtgctgaccgtgctgcaccaggattggctgaacggcaaagagtacaagtgcaaggtgtccaacaaggccctgcctgcccctgaggaaaagaccatcagcaaggccaagggccagcctagggaaccccaggtttacacactgcctccaagccgcgaggaaatgaccaagaaccaggtgtccctgacctgcctcgtgaagggcttctacccttccgatatcgccgtggaatgggagagcaatggccagcctgagaacaactacaagacaacccctcctgtgctggacagcgacggctcattcttcctgtacagcaagctgaccgtggacaagtccagatggcagcagggcaacgtgttcagctgtagcgtgctgcacgaagccctgcacagccactacacccagaaaagcctgtctctgagccccggcaaatgataaggatccgatctggtactgcatgcacgcaatgctagctgcccctttcccgtcctgggtaccccgagtctcccccgacctcgggtcccaggtatgctcccacctccacctgccccactcaccacctctgctagttccagacacctcccaagcacgcagcaatgcagctcaaaacgcttagcctagccacacccccacgggaaacagcagtgattaacctttagcaataaacgaaagtttaactaagctatactaaccccagggttggtcaatttcgtgccagccacaccctcgagctagcaaaaaaaaaaaaaaaaaaaaaaaaaaaaaagcatatgactaaaaaaaaaaaaaaaaaaaaaaaaaaaaaaaaaaaaaaaaaaaaaaaaaaaaaaaaaaaaaaaaaaaaaa

SEQ ID NO: 1149 - RNA, 2114 nt, synthetic construct
  source 1..2114: mol_type = other RNA
agaataaactagtattcttctggtccccacagactcagagagaacccgccaccatggattggatctggcgcatcctgtttctcgtgggagctgccacaggcgcccacagcgattttgtgctgacacagtctccccacagcctgagcgttacacctggcgagtctgccagcatcagctgcaagtctagccactctctgatccacggcgaccggaacaactacctggcttggtacgtgcagaagcccggcagatctcctcagctgctgatctacctggccagcagcagagcttctggcgtgcccgatagattttctggcagcggcagcgacaaggacttcaccctgaagatctccagagtggaaaccgaggacgtgggcacctactactgtatgcagggcagagagagcccctggacatttggccagggcaccaaggtggacatcaaaggcggcggaggaagcggaggcggaggttctggtggtggtggctctggtggcggaggctcaggcggtggcggatctcaagttcatctgacacagagcggccctgaagtgcggaagcctggcacaagcgtgaaggtgtcctgtaaagcccctggcaacaccctgaaaacctacgacctgcactgggtccgatctgtgcctggacagggactgcaatggatgggctggattagccacgagggcgacaagaaagtgatcgtggaacggttcaaggccaaagtgaccatcgactgggacagaagcaccaacaccgcctacctgcagctgagcggactgacatctggcgataccgccgtgtactactgtgccaagggcagcaagcaccggctgagagattacgccctgtacgacgatgacggcgccctgaattgggccgtcgatgtggactacctgagcaacctggaattctggggccagggaacagccgtgacagtgtcttccggcggaggtggaagtggtggcggcggatctggcggcggtgggtccggaggtggtggatctgaacctaagagcagcgacaagacccacacctgtcctccatgtcctgctccagaactgctcggcggaccttccgtgttcctgtttcctccaaagcctaaggacaccctgatgatcagcagaacccctgaagtgacctgcgtggtggtggatgtgtctcacgaggaccccgaagtgaagttcaattggtacgtggacggcgtggaagtgcacaacgccaagaccaagcctagagaggaacagtacaacagcacctacagagtggtgtccgtgctgacagtgctgcaccaggattggctgaacggcaaagagtacaagtgcaaggtgtccaacaaggccctgcctgctcctatcgagaaaaccatcagcaaggccaagggccagcctagggaaccccaagtctgtacactgcctcctagccgcgaggaaatgaccaagaaccaggtgtccctgagctgcgccgtgaagggcttttacccttccgatatcgccgtggaatgggagagcaatggccagcctgagaacaactacaagacaacccctcctgtgctggacagcgacggctcattcttcctggtgtccaagctgacagtggacaagagcagatggcagcagggcaacgtgttcagctgctctgtgctgcacgaagccctgcacagccactacacccagaagtccctgtctctgagccccggcaagtgataaggatccgatctggtactgcatgcacgcaatgctagctgcccctttcccgtcctgggtaccccgagtctcccccgacctcgggtcccaggtatgctcccacctccacctgccccactcaccacctctgctagttccagacacctcccaagcacgcagcaatgcagctcaaaacgcttagcctagccacacccccacgggaaacagcagtgattaacctttagcaataaacgaaagtttaactaagctatactaaccccagggttggtcaatttcgtgccagccacaccctcgagctagcaaaaaaaaaaaaaaaaaaaaaaaaaaaaaagcatatgactaaaaaaaaaaaaaaaaaaaaaaaaaaaaaaaaaaaaaaaaaaaaaaaaaaaaaaaaaaaaaaaaaaaaaa

SEQ ID NO: 1150 - RNA, 2114 nt, synthetic construct
  source 1..2114: mol_type = other RNA
agaataaactagtattcttctggtccccacagactcagagagaacccgccaccatggattggatctggcgcatcctgtttctcgtgggagctgccacaggcgcccacagcgattttgtgctgacacagtctccccacagcctgagcgttacacctggcgagtctgccagcatcagctgcaagtctagccactctctgatccacggcgaccggaacaactacctggcttggtacgtgcagaagcccggcagatctcctcagctgctgatctacctggccagcagcagagcttctggcgtgcccgatagattttctggcagcggcagcgacaaggacttcaccctgaagatctccagagtggaaaccgaggacgtgggcacctactactgtatgcagggcagagagagcccctggacatttggccagggcaccaaggtggacatcaaaggcggcggaggaagcggaggcggaggttctggtggtggtggctctggtggcggaggctcaggcggtggcggatctcaagttcatctgacacagagcggccctgaagtgcggaagcctggcacaagcgtgaaggtgtcctgtaaagcccctggcaacaccctgaaaacctacgacctgcactgggtccgatctgtgcctggacagggactgcaatggatgggctggattagccacgagggcgacaagaaagtgatcgtggaacggttcaaggccaaagtgaccatcgactgggacagaagcaccaacaccgcctacctgcagctgagcggactgacatctggcgataccgccgtgtactactgtgccaagggcagcaagcaccggctgagagattacgccctgtacgacgatgacggcgccctgaattgggccgtcgatgtggactacctgagcaacctggaattctggggccagggaacagccgtgacagtgtcttccggcggaggtggaagtggtggcggcggatctggcggcggtgggtccggaggtggtggatctgaacctaagagcagcgacaagacccacacctgtcctccatgtcctgctccagaactgctggccggaccttccgtgttcctgtttcctccaaagcctaaggacaccctgatgatcagcagaacccctgaagtgacctgcgtggtggtggatgtgtctcacgaggaccccgaagtgaagttcaattggtacgtggacggcgtggaagtgcacaatgccaagaccaagcctagagaggaacagtacaacagcacctacagagtggtgtccgtgctgaccgtgctgcaccaggattggctgaacggcaaagagtacaagtgcaaggtgtccaacaaggccctgcctctgcctgaggaaaagaccatcagcaaggccaagggccagcctagggaaccccaagtctgtacactgcctcctagccgcgaggaaatgaccaagaaccaggtgtccctgagctgcgccgtgaagggcttttacccttccgatatcgccgtggaatgggagagcaatggccagcctgagaacaactacaagacaacccctcctgtgctggacagcgacggctcattcttcctggtgtccaagctgacagtggacaagagcagatggcagcagggcaacgtgttcagctgctctgtgctgcacgaagccctgcacagccactacacccagaagtccctgtctctgagccccggcaagtgataaggatccgatctggtactgcatgcacgcaatgctagctgcccctttcccgtcctgggtaccccgagtctcccccgacctcgggtcccaggtatgctcccacctccacctgccccactcaccacctctgctagttccagacacctcccaagcacgcagcaatgcagctcaaaacgcttagcctagccacacccccacgggaaacagcagtgattaacctttagcaataaacgaaagtttaactaagctatactaaccccagggttggtcaatttcgtgccagccacaccctcgagctagcaaaaaaaaaaaaaaaaaaaaaaaaaaaaaagcatatgactaaaaaaaaaaaaaaaaaaaaaaaaaaaaaaaaaaaaaaaaaaaaaaaaaaaaaaaaaaaaaaaaaaaaaa

SEQ ID NO: 1151 - RNA, 2114 nt, synthetic construct
  source 1..2114: mol_type = other RNA
agaataaactagtattcttctggtccccacagactcagagagaacccgccaccatggattggatctggcgcatcctgtttctcgtgggagctgccacaggcgcccacagcgattttgtgctgacacagtctccccacagcctgagcgttacacctggcgagtctgccagcatcagctgcaagtctagccactctctgatccacggcgaccggaacaactacctggcttggtacgtgcagaagcccggcagatctcctcagctgctgatctacctggccagcagcagagcttctggcgtgcccgatagattttctggcagcggcagcgacaaggacttcaccctgaagatctccagagtggaaaccgaggacgtgggcacctactactgtatgcagggcagagagagcccctggacatttggccagggcaccaaggtggacatcaaaggcggcggaggaagcggaggcggaggttctggtggtggtggctctggtggcggaggctcaggcggtggcggatctcaagttcatctgacacagagcggccctgaagtgcggaagcctggcacaagcgtgaaggtgtcctgtaaagcccctggcaacaccctgaaaacctacgacctgcactgggtccgatctgtgcctggacagggactgcaatggatgggctggattagccacgagggcgacaagaaagtgatcgtggaacggttcaaggccaaagtgaccatcgactgggacagaagcaccaacaccgcctacctgcagctgagcggactgacatctggcgataccgccgtgtactactgtgccaagggcagcaagcaccggctgagagattacgccctgtacgacgatgacggcgccctgaattgggccgtcgatgtggactacctgagcaacctggaattctggggccagggaacagccgtgacagtgtcttccggcggaggtggaagtggtggcggcggatctggcggcggtgggtccggaggtggtggatctgaacctaagagcagcgacaagacccacacctgtcctccatgtcctgctccagaactgctggccggaccttccgtgttcctgtttcctccaaagcctaaggacaccctgatgatcagcagaacccctgaagtgacctgcgtggtggtggatgtgtctcacgaggaccctgaagtgaagttcaattggtacgtggacggcgtggaagtgcacaacgccaagaccaagcctagagaggaacagtacaacagcacctacagagtggtgtccgtgctgaccgtgctgcaccaggattggctgaacggcaaagagtacaagtgcaaggtgtccaacaaggccctgcctgcccctgaggaaaagaccatcagcaaggccaagggccagcctagggaaccccaagtctgtacactgcctcctagccgcgaggaaatgaccaagaaccaggtgtccctgagctgcgccgtgaagggcttttacccttccgatatcgccgtggaatgggagagcaatggccagcctgagaacaactacaagacaacccctcctgtgctggacagcgacggctcattcttcctggtgtccaagctgacagtggacaagagcagatggcagcagggcaacgtgttcagctgctctgtgctgcacgaagccctgcacagccactacacccagaagtccctgtctctgagccccggcaagtgataaggatccgatctggtactgcatgcacgcaatgctagctgcccctttcccgtcctgggtaccccgagtctcccccgacctcgggtcccaggtatgctcccacctccacctgccccactcaccacctctgctagttccagacacctcccaagcacgcagcaatgcagctcaaaacgcttagcctagccacacccccacgggaaacagcagtgattaacctttagcaataaacgaaagtttaactaagctatactaaccccagggttggtcaatttcgtgccagccacaccctcgagctagcaaaaaaaaaaaaaaaaaaaaaaaaaaaaaagcatatgactaaaaaaaaaaaaaaaaaaaaaaaaaaaaaaaaaaaaaaaaaaaaaaaaaaaaaaaaaaaaaaaaaaaaaa

SEQ ID NO: 1152 - RNA, 2114 nt, synthetic construct
  source 1..2114: mol_type = other RNA
agaataaactagtattcttctggtccccacagactcagagagaacccgccaccatggattggatctggcgcatcctgtttctcgtgggagctgccacaggcgcccacagcgattttgtgctgacacagtctccccacagcctgagcgttacacctggcgagtctgccagcatcagctgcaagtctagccactctctgatccacggcgaccggaacaactacctggcttggtacgtgcagaagcccggcagatctcctcagctgctgatctacctggccagcagcagagcttctggcgtgcccgatagattttctggcagcggcagcgacaaggacttcaccctgaagatctccagagtggaaaccgaggacgtgggcacctactactgtatgcagggcagagagagcccctggacatttggccagggcaccaaggtggacatcaaaggcggcggaggaagcggaggcggaggttctggtggtggtggctctggtggcggaggctcaggcggtggcggatctcaagttcatctgacacagagcggccctgaagtgcggaagcctggcacaagcgtgaaggtgtcctgtaaagcccctggcaacaccctgaaaacctacgacctgcactgggtccgatctgtgcctggacagggactgcaatggatgggctggattagccacgagggcgacaagaaagtgatcgtggaacggttcaaggccaaagtgaccatcgactgggacagaagcaccaacaccgcctacctgcagctgagcggactgacatctggcgataccgccgtgtactactgtgccaagggcagcaagcaccggctgagagattacgccctgtacgacgatgacggcgccctgaattgggccgtcgatgtggactacctgagcaacctggaattctggggccagggaacagccgtgacagtgtcttccggcggaggtggaagtggtggcggcggatctggcggcggtgggtccggaggtggtggatctgaacctaagagcagcgacaagacccacacctgtcctccatgtcctgctccagaactgctggccggaccttccgtgttcctgtttcctccaaagcctaaggacaccctgatgatcagcagaacccctgaagtgacctgcgtggtggtggatgtgtctcacgaggaccctgaagtgaagttcaattggtacgtggacggcgtggaagtgcacaacgccaagaccaagcctagagaggaacagtacaacagcacctacagagtggtgtccgtgctgaccgtgctgcaccaggattggctgaacggcaaagagtacaagtgcaaggtgtccaacaaggccctgcctgcccctatcgaaaagaccatcagcaaggccaagggccagcctagggaaccccaagtctgtacactgcctcctagccgcgaggaaatgaccaagaaccaggtgtccctgagctgcgccgtgaagggcttttacccttccgatatcgccgtggaatgggagagcaatggccagcctgagaacaactacaagacaacccctcctgtgctggacagcgacggctcattcttcctggtgtccaagctgacagtggacaagagcagatggcagcagggcaacgtgttcagctgctctgtgctgcacgaagccctgcacagccactacacccagaagtccctgtctctgagccccggcaagtgataaggatccgatctggtactgcatgcacgcaatgctagctgcccctttcccgtcctgggtaccccgagtctcccccgacctcgggtcccaggtatgctcccacctccacctgccccactcaccacctctgctagttccagacacctcccaagcacgcagcaatgcagctcaaaacgcttagcctagccacacccccacgggaaacagcagtgattaacctttagcaataaacgaaagtttaactaagctatactaaccccagggttggtcaatttcgtgccagccacaccctcgagctagcaaaaaaaaaaaaaaaaaaaaaaaaaaaaaagcatatgactaaaaaaaaaaaaaaaaaaaaaaaaaaaaaaaaaaaaaaaaaaaaaaaaaaaaaaaaaaaaaaaaaaaaaa

SEQ ID NO: 1153 - RNA, 2114 nt, synthetic construct
  source 1..2114: mol_type = other RNA
agaataaactagtattcttctggtccccacagactcagagagaacccgccaccatggattggatctggcgcatcctgtttctcgtgggagctgccacaggcgcccacagcgattttgtgctgacacagtctccccacagcctgagcgttacacctggcgagtctgccagcatcagctgcaagtctagccactctctgatccacggcgaccggaacaactacctggcttggtacgtgcagaagcccggcagatctcctcagctgctgatctacctggccagcagcagagcttctggcgtgcccgatagattttctggcagcggcagcgacaaggacttcaccctgaagatctccagagtggaaaccgaggacgtgggcacctactactgtatgcagggcagagagagcccctggacatttggccagggcaccaaggtggacatcaaaggcggcggaggaagcggaggcggaggttctggtggtggtggctctggtggcggaggctcaggcggtggcggatctcaagttcatctgacacagagcggccctgaagtgcggaagcctggcacaagcgtgaaggtgtcctgtaaagcccctggcaacaccctgaaaacctacgacctgcactgggtccgatctgtgcctggacagggactgcaatggatgggctggattagccacgagggcgacaagaaagtgatcgtggaacggttcaaggccaaagtgaccatcgactgggacagaagcaccaacaccgcctacctgcagctgagcggactgacatctggcgataccgccgtgtactactgtgccaagggcagcaagcaccggctgagagattacgccctgtacgacgatgacggcgccctgaattgggccgtcgatgtggactacctgagcaacctggaattctggggccagggaacagccgtgacagtgtcttccggcggaggtggaagtggtggcggcggatctggcggcggtgggtccggaggtggtggatctgaacctaagagcagcgacaagacccacacctgtcctccatgtcctgctccagaactgctgggcggaccttccgtgttcctgtttcctccaaagcctaaggacaccctgatgatcagcagaacccctgaagtgacctgcgtggtggtggatgtgtctcacgaggaccctgaagtgaagttcaattggtacgtggacggcgtggaagtgcacaacgccaagaccaagcctagagaggaacagtacaacagcacctacagagtggtgtccgtgctgaccgtgctgcaccaggattggctgaacggcaaagagtacaagtgcaaggtgtccaacaaggccctgcctgcccctgaggaaaagaccatcagcaaggccaagggccagcctagggaaccccaagtctgtacactgcctcctagccgcgaggaaatgaccaagaaccaggtgtccctgagctgcgccgtgaagggcttttacccttccgatatcgccgtggaatgggagagcaatggccagcctgagaacaactacaagacaacccctcctgtgctggacagcgacggctcattcttcctggtgtccaagctgacagtggacaagagcagatggcagcagggcaacgtgttcagctgctctgtgctgcacgaagccctgcacagccactacacccagaagtccctgtctctgagccccggcaagtgataaggatccgatctggtactgcatgcacgcaatgctagctgcccctttcccgtcctgggtaccccgagtctcccccgacctcgggtcccaggtatgctcccacctccacctgccccactcaccacctctgctagttccagacacctcccaagcacgcagcaatgcagctcaaaacgcttagcctagccacacccccacgggaaacagcagtgattaacctttagcaataaacgaaagtttaactaagctatactaaccccagggttggtcaatttcgtgccagccacaccctcgagctagcaaaaaaaaaaaaaaaaaaaaaaaaaaaaaagcatatgactaaaaaaaaaaaaaaaaaaaaaaaaaaaaaaaaaaaaaaaaaaaaaaaaaaaaaaaaaaaaaaaaaaaaaa

SEQ ID NO: 1154 - RNA, 2114 nt, synthetic construct
  source 1..2114: mol_type = other RNA
agaataaactagtattcttctggtccccacagactcagagagaacccgccaccatggattggatctggcgcatcctgtttctcgtgggagctgccacaggcgcccacagcgattttgtgctgacacagtctccccacagcctgagcgttacacctggcgagtctgccagcatcagctgcaagtctagccactctctgatccacggcgaccggaacaactacctggcttggtacgtgcagaagcccggcagatctcctcagctgctgatctacctggccagcagcagagcttctggcgtgcccgatagattttctggcagcggcagcgacaaggacttcaccctgaagatctccagagtggaaaccgaggacgtgggcacctactactgtatgcagggcagagagagcccctggacatttggccagggcaccaaggtggacatcaaaggcggcggaggaagcggaggcggaggttctggtggtggtggctctggtggcggaggctcaggcggtggcggatctcaagttcatctgacacagagcggccctgaagtgcggaagcctggcacaagcgtgaaggtgtcctgtaaagcccctggcaacaccctgaaaacctacgacctgcactgggtccgatctgtgcctggacagggactgcaatggatgggctggattagccacgagggcgacaagaaagtgatcgtggaacggttcaaggccaaagtgaccatcgactgggacagaagcaccaacaccgcctacctgcagctgagcggactgacatctggcgataccgccgtgtactactgtgccaagggcagcaagcaccggctgagagattacgccctgtacgacgatgacggcgccctgaattgggccgtcgatgtggactacctgagcaacctggaattctggggccagggaacagccgtgacagtgtcttccggcggaggtggaagtggtggcggcggatctggcggcggtgggtccggaggtggtggatctgaacctaagagcagcgacaagacccacacctgtcctccatgtcctgctccagaactgctcggcggaccttccgtgttcctgtttcctccaaagcctaaggacaccctgatgatcagcagaacccctgaagtgacctgcgtggtggtggatgtgtctcacgaggaccccgaagtgaagttcaattggtacgtggacggcgtggaagtgcacaacgccaagaccaagcctagagaggaacagtacaacagcacctacagagtggtgtccgtgctgacagtgctgcaccaggattggctgaacggcaaagagtacaagtgcaaggtgtccaacaaggccctgcctgctcctatcgagaaaaccatcagcaaggccaagggccagcctagggaaccccaggtttacaccctgcctccatgccgcgaggaaatgaccaagaaccaggtgtccctgtggtgcctcgtgaagggcttctacccttccgatatcgccgtggaatgggagagcaatggccagcctgagaacaactacaagacaacccctcctgtgctggacagcgacggctcattcttcctgtacagcaagctgaccgtggacaagtccagatggcagcagggcaacgtgttcagctgtagcgtgctgcacgaagccctgcacagccactacacccagaagtccctgtctctgagccccggcaagtgataaggatccgatctggtactgcatgcacgcaatgctagctgcccctttcccgtcctgggtaccccgagtctcccccgacctcgggtcccaggtatgctcccacctccacctgccccactcaccacctctgctagttccagacacctcccaagcacgcagcaatgcagctcaaaacgcttagcctagccacacccccacgggaaacagcagtgattaacctttagcaataaacgaaagtttaactaagctatactaaccccagggttggtcaatttcgtgccagccacaccctcgagctagcaaaaaaaaaaaaaaaaaaaaaaaaaaaaaagcatatgactaaaaaaaaaaaaaaaaaaaaaaaaaaaaaaaaaaaaaaaaaaaaaaaaaaaaaaaaaaaaaaaaaaaaaa

SEQ ID NO: 1155 - RNA, 2114 nt, synthetic construct
  source 1..2114: mol_type = other RNA
agaataaactagtattcttctggtccccacagactcagagagaacccgccaccatggattggatctggcgcatcctgtttctcgtgggagctgccacaggcgcccacagcgattttgtgctgacacagtctccccacagcctgagcgttacacctggcgagtctgccagcatcagctgcaagtctagccactctctgatccacggcgaccggaacaactacctggcttggtacgtgcagaagcccggcagatctcctcagctgctgatctacctggccagcagcagagcttctggcgtgcccgatagattttctggcagcggcagcgacaaggacttcaccctgaagatctccagagtggaaaccgaggacgtgggcacctactactgtatgcagggcagagagagcccctggacatttggccagggcaccaaggtggacatcaaaggcggcggaggaagcggaggcggaggttctggtggtggtggctctggtggcggaggctcaggcggtggcggatctcaagttcatctgacacagagcggccctgaagtgcggaagcctggcacaagcgtgaaggtgtcctgtaaagcccctggcaacaccctgaaaacctacgacctgcactgggtccgatctgtgcctggacagggactgcaatggatgggctggattagccacgagggcgacaagaaagtgatcgtggaacggttcaaggccaaagtgaccatcgactgggacagaagcaccaacaccgcctacctgcagctgagcggactgacatctggcgataccgccgtgtactactgtgccaagggcagcaagcaccggctgagagattacgccctgtacgacgatgacggcgccctgaattgggccgtcgatgtggactacctgagcaacctggaattctggggccagggaacagccgtgacagtgtcttccggcggaggtggaagtggtggcggcggatctggcggcggtgggtccggaggtggtggatctgaacctaagagcagcgacaagacccacacctgtcctccatgtcctgctccagaactgctggccggaccttccgtgttcctgtttcctccaaagcctaaggacaccctgatgatcagcagaacccctgaagtgacctgcgtggtggtggatgtgtctcacgaggaccccgaagtgaagttcaattggtacgtggacggcgtggaagtgcacaatgccaagaccaagcctagagaggaacagtacaacagcacctacagagtggtgtccgtgctgaccgtgctgcaccaggattggctgaacggcaaagagtacaagtgcaaggtgtccaacaaggccctgcctctgcctgaggaaaagaccatcagcaaggccaagggccagcctagggaaccccaggtttacaccctgcctccatgccgcgaggaaatgaccaagaaccaggtgtccctgtggtgcctcgtgaagggcttctacccttccgatatcgccgtggaatgggagagcaatggccagcctgagaacaactacaagacaacccctcctgtgctggacagcgacggctcattcttcctgtacagcaagctgaccgtggacaagtccagatggcagcagggcaacgtgttcagctgtagcgtgctgcacgaagccctgcacagccactacacccagaagtccctgtctctgagccccggcaagtgataaggatccgatctggtactgcatgcacgcaatgctagctgcccctttcccgtcctgggtaccccgagtctcccccgacctcgggtcccaggtatgctcccacctccacctgccccactcaccacctctgctagttccagacacctcccaagcacgcagcaatgcagctcaaaacgcttagcctagccacacccccacgggaaacagcagtgattaacctttagcaataaacgaaagtttaactaagctatactaaccccagggttggtcaatttcgtgccagccacaccctcgagctagcaaaaaaaaaaaaaaaaaaaaaaaaaaaaaagcatatgactaaaaaaaaaaaaaaaaaaaaaaaaaaaaaaaaaaaaaaaaaaaaaaaaaaaaaaaaaaaaaaaaaaaaaa

SEQ ID NO: 1156 - RNA, 2114 nt, synthetic construct
  source 1..2114: mol_type = other RNA
agaataaactagtattcttctggtccccacagactcagagagaacccgccaccatggattggatctggcgcatcctgtttctcgtgggagctgccacaggcgcccacagcgattttgtgctgacacagtctccccacagcctgagcgttacacctggcgagtctgccagcatcagctgcaagtctagccactctctgatccacggcgaccggaacaactacctggcttggtacgtgcagaagcccggcagatctcctcagctgctgatctacctggccagcagcagagcttctggcgtgcccgatagattttctggcagcggcagcgacaaggacttcaccctgaagatctccagagtggaaaccgaggacgtgggcacctactactgtatgcagggcagagagagcccctggacatttggccagggcaccaaggtggacatcaaaggcggcggaggaagcggaggcggaggttctggtggtggtggctctggtggcggaggctcaggcggtggcggatctcaagttcatctgacacagagcggccctgaagtgcggaagcctggcacaagcgtgaaggtgtcctgtaaagcccctggcaacaccctgaaaacctacgacctgcactgggtccgatctgtgcctggacagggactgcaatggatgggctggattagccacgagggcgacaagaaagtgatcgtggaacggttcaaggccaaagtgaccatcgactgggacagaagcaccaacaccgcctacctgcagctgagcggactgacatctggcgataccgccgtgtactactgtgccaagggcagcaagcaccggctgagagattacgccctgtacgacgatgacggcgccctgaattgggccgtcgatgtggactacctgagcaacctggaattctggggccagggaacagccgtgacagtgtcttccggcggaggtggaagtggtggcggcggatctggcggcggtgggtccggaggtggtggatctgaacctaagagcagcgacaagacccacacctgtcctccatgtcctgctccagaactgctggccggaccttccgtgttcctgtttcctccaaagcctaaggacaccctgatgatcagcagaacccctgaagtgacctgcgtggtggtggatgtgtctcacgaggaccctgaagtgaagttcaattggtacgtggacggcgtggaagtgcacaacgccaagaccaagcctagagaggaacagtacaacagcacctacagagtggtgtccgtgctgaccgtgctgcaccaggattggctgaacggcaaagagtacaagtgcaaggtgtccaacaaggccctgcctgcccctgaggaaaagaccatcagcaaggccaagggccagcctagggaaccccaggtttacaccctgcctccatgccgcgaggaaatgaccaagaaccaggtgtccctgtggtgcctcgtgaagggcttctacccttccgatatcgccgtggaatgggagagcaatggccagcctgagaacaactacaagacaacccctcctgtgctggacagcgacggctcattcttcctgtacagcaagctgaccgtggacaagtccagatggcagcagggcaacgtgttcagctgtagcgtgctgcacgaagccctgcacagccactacacccagaagtccctgtctctgagccccggcaagtgataaggatccgatctggtactgcatgcacgcaatgctagctgcccctttcccgtcctgggtaccccgagtctcccccgacctcgggtcccaggtatgctcccacctccacctgccccactcaccacctctgctagttccagacacctcccaagcacgcagcaatgcagctcaaaacgcttagcctagccacacccccacgggaaacagcagtgattaacctttagcaataaacgaaagtttaactaagctatactaaccccagggttggtcaatttcgtgccagccacaccctcgagctagcaaaaaaaaaaaaaaaaaaaaaaaaaaaaaagcatatgactaaaaaaaaaaaaaaaaaaaaaaaaaaaaaaaaaaaaaaaaaaaaaaaaaaaaaaaaaaaaaaaaaaaaaa

SEQ ID NO: 1157 - RNA, 2114 nt, synthetic construct
  source 1..2114: mol_type = other RNA
agaataaactagtattcttctggtccccacagactcagagagaacccgccaccatggattggatctggcgcatcctgtttctcgtgggagctgccacaggcgcccacagcgattttgtgctgacacagtctccccacagcctgagcgttacacctggcgagtctgccagcatcagctgcaagtctagccactctctgatccacggcgaccggaacaactacctggcttggtacgtgcagaagcccggcagatctcctcagctgctgatctacctggccagcagcagagcttctggcgtgcccgatagattttctggcagcggcagcgacaaggacttcaccctgaagatctccagagtggaaaccgaggacgtgggcacctactactgtatgcagggcagagagagcccctggacatttggccagggcaccaaggtggacatcaaaggcggcggaggaagcggaggcggaggttctggtggtggtggctctggtggcggaggctcaggcggtggcggatctcaagttcatctgacacagagcggccctgaagtgcggaagcctggcacaagcgtgaaggtgtcctgtaaagcccctggcaacaccctgaaaacctacgacctgcactgggtccgatctgtgcctggacagggactgcaatggatgggctggattagccacgagggcgacaagaaagtgatcgtggaacggttcaaggccaaagtgaccatcgactgggacagaagcaccaacaccgcctacctgcagctgagcggactgacatctggcgataccgccgtgtactactgtgccaagggcagcaagcaccggctgagagattacgccctgtacgacgatgacggcgccctgaattgggccgtcgatgtggactacctgagcaacctggaattctggggccagggaacagccgtgacagtgtcttccggcggaggtggaagtggtggcggcggatctggcggcggtgggtccggaggtggtggatctgaacctaagagcagcgacaagacccacacctgtcctccatgtcctgctccagaactgctggccggaccttccgtgttcctgtttcctccaaagcctaaggacaccctgatgatcagcagaacccctgaagtgacctgcgtggtggtggatgtgtctcacgaggaccctgaagtgaagttcaattggtacgtggacggcgtggaagtgcacaacgccaagaccaagcctagagaggaacagtacaacagcacctacagagtggtgtccgtgctgaccgtgctgcaccaggattggctgaacggcaaagagtacaagtgcaaggtgtccaacaaggccctgcctgcccctatcgaaaagaccatcagcaaggccaagggccagcctagggaaccccaggtttacaccctgcctccatgccgcgaggaaatgaccaagaaccaggtgtccctgtggtgcctcgtgaagggcttctacccttccgatatcgccgtggaatgggagagcaatggccagcctgagaacaactacaagacaacccctcctgtgctggacagcgacggctcattcttcctgtacagcaagctgaccgtggacaagtccagatggcagcagggcaacgtgttcagctgtagcgtgctgcacgaagccctgcacagccactacacccagaagtccctgtctctgagccccggcaagtgataaggatccgatctggtactgcatgcacgcaatgctagctgcccctttcccgtcctgggtaccccgagtctcccccgacctcgggtcccaggtatgctcccacctccacctgccccactcaccacctctgctagttccagacacctcccaagcacgcagcaatgcagctcaaaacgcttagcctagccacacccccacgggaaacagcagtgattaacctttagcaataaacgaaagtttaactaagctatactaaccccagggttggtcaatttcgtgccagccacaccctcgagctagcaaaaaaaaaaaaaaaaaaaaaaaaaaaaaagcatatgactaaaaaaaaaaaaaaaaaaaaaaaaaaaaaaaaaaaaaaaaaaaaaaaaaaaaaaaaaaaaaaaaaaaaaa

SEQ ID NO: 1158 - RNA, 2114 nt, synthetic construct
  source 1..2114: mol_type = other RNA
agaataaactagtattcttctggtccccacagactcagagagaacccgccaccatggattggatctggcgcatcctgtttctcgtgggagctgccacaggcgcccacagcgattttgtgctgacacagtctccccacagcctgagcgttacacctggcgagtctgccagcatcagctgcaagtctagccactctctgatccacggcgaccggaacaactacctggcttggtacgtgcagaagcccggcagatctcctcagctgctgatctacctggccagcagcagagcttctggcgtgcccgatagattttctggcagcggcagcgacaaggacttcaccctgaagatctccagagtggaaaccgaggacgtgggcacctactactgtatgcagggcagagagagcccctggacatttggccagggcaccaaggtggacatcaaaggcggcggaggaagcggaggcggaggttctggtggtggtggctctggtggcggaggctcaggcggtggcggatctcaagttcatctgacacagagcggccctgaagtgcggaagcctggcacaagcgtgaaggtgtcctgtaaagcccctggcaacaccctgaaaacctacgacctgcactgggtccgatctgtgcctggacagggactgcaatggatgggctggattagccacgagggcgacaagaaagtgatcgtggaacggttcaaggccaaagtgaccatcgactgggacagaagcaccaacaccgcctacctgcagctgagcggactgacatctggcgataccgccgtgtactactgtgccaagggcagcaagcaccggctgagagattacgccctgtacgacgatgacggcgccctgaattgggccgtcgatgtggactacctgagcaacctggaattctggggccagggaacagccgtgacagtgtcttccggcggaggtggaagtggtggcggcggatctggcggcggtgggtccggaggtggtggatctgaacctaagagcagcgacaagacccacacctgtcctccatgtcctgctccagaactgctgggcggaccttccgtgttcctgtttcctccaaagcctaaggacaccctgatgatcagcagaacccctgaagtgacctgcgtggtggtggatgtgtctcacgaggaccctgaagtgaagttcaattggtacgtggacggcgtggaagtgcacaacgccaagaccaagcctagagaggaacagtacaacagcacctacagagtggtgtccgtgctgaccgtgctgcaccaggattggctgaacggcaaagagtacaagtgcaaggtgtccaacaaggccctgcctgcccctgaggaaaagaccatcagcaaggccaagggccagcctagggaaccccaggtttacaccctgcctccatgccgcgaggaaatgaccaagaaccaggtgtccctgtggtgcctcgtgaagggcttctacccttccgatatcgccgtggaatgggagagcaatggccagcctgagaacaactacaagacaacccctcctgtgctggacagcgacggctcattcttcctgtacagcaagctgaccgtggacaagtccagatggcagcagggcaacgtgttcagctgtagcgtgctgcacgaagccctgcacagccactacacccagaagtccctgtctctgagccccggcaagtgataaggatccgatctggtactgcatgcacgcaatgctagctgcccctttcccgtcctgggtaccccgagtctcccccgacctcgggtcccaggtatgctcccacctccacctgccccactcaccacctctgctagttccagacacctcccaagcacgcagcaatgcagctcaaaacgcttagcctagccacacccccacgggaaacagcagtgattaacctttagcaataaacgaaagtttaactaagctatactaaccccagggttggtcaatttcgtgccagccacaccctcgagctagcaaaaaaaaaaaaaaaaaaaaaaaaaaaaaagcatatgactaaaaaaaaaaaaaaaaaaaaaaaaaaaaaaaaaaaaaaaaaaaaaaaaaaaaaaaaaaaaaaaaaaaaaa

SEQ ID NO: 1159 - RNA, 2114 nt, synthetic construct; identical to SEQ ID NO: 1143
  source 1..2114: mol_type = other RNA

SEQ ID NO: 1160 - RNA, 2114 nt, synthetic construct; identical to SEQ ID NO: 1144
  source 1..2114: mol_type = other RNA

SEQ ID NO: 1161 - RNA, 2114 nt, synthetic construct; identical to SEQ ID NO: 1145
  source 1..2114: mol_type = other RNA

SEQ ID NO: 1162 - RNA, 2114 nt, synthetic construct; identical to SEQ ID NO: 1146
  source 1..2114: mol_type = other RNA

SEQ ID NO: 1163 - RNA, 2114 nt, synthetic construct; identical to SEQ ID NO: 1147
  source 1..2114: mol_type = other RNA

SEQ ID NO: 1164 - RNA, 2114 nt, synthetic construct; identical to SEQ ID NO: 1148
  source 1..2114: mol_type = other RNA

SEQ ID NO: 1165 - RNA, 2114 nt, synthetic construct; identical to SEQ ID NO: 1149
  source 1..2114: mol_type = other RNA

SEQ ID NO: 1166 - RNA, 2114 nt, synthetic construct; identical to SEQ ID NO: 1150
  source 1..2114: mol_type = other RNA

SEQ ID NO: 1167 - RNA, 2114 nt, synthetic construct; identical to SEQ ID NO: 1151
  source 1..2114: mol_type = other RNA

SEQ ID NO: 1168 - RNA, 2114 nt, synthetic construct; identical to SEQ ID NO: 1152
  source 1..2114: mol_type = other RNA

SEQ ID NO: 1169 - RNA, 2114 nt, synthetic construct; identical to SEQ ID NO: 1153
  source 1..2114: mol_type = other RNA

SEQ ID NO: 1170 - RNA, 2114 nt, synthetic construct; identical to SEQ ID NO: 1154
  source 1..2114: mol_type = other RNA

SEQ ID NO: 1171 - RNA, 2114 nt, synthetic construct; identical to SEQ ID NO: 1155
  source 1..2114: mol_type = other RNA

SEQ ID NO: 1172 - RNA, 2114 nt, synthetic construct; identical to SEQ ID NO: 1156
  source 1..2114: mol_type = other RNA

SEQ ID NO: 1173 - RNA, 2114 nt, synthetic construct; identical to SEQ ID NO: 1157
  source 1..2114: mol_type = other RNA

SEQ ID NO: 1174 - RNA, 2114 nt, synthetic construct; identical to SEQ ID NO: 1158
  source 1..2114: mol_type = other RNA

SEQ ID NO: 1175 - RNA, 2114 nt, synthetic construct
  source 1..2114: mol_type = other RNA
agaataaactagtattcttctggtccccacagactcagagagaacccgccaccatggattggatctggcgcatcctgtttctcgtgggagctgccacaggcgcccacagcgattttgtgctgacacagtctccccacagcctgagcgttacacctggcgagtctgccagcatcagctgcaagtctagccactctctgatccacggcgaccggaacaactacctggcttggtacgtgcagaagcccggcagatctcctcagctgctgatctacctggccagcagcagagcttctggcgtgcccgatagattttctggcagcggcagcgacaaggacttcaccctgaagatctccagagtggaaaccgaggacgtgggcacctactactgtatgcagggcagagagagcccctggacatttggccagggcaccaaggtggacatcaaaggcggcggaggaagcggaggcggaggttctggtggtggtggctctggtggcggaggctcaggcggtggcggatctcaagttcatctgacacagagcggccctgaagtgcggaagcctggcacaagcgtgaaggtgtcctgtaaagcccctggcaacaccctgaaaacctacgacctgcactgggtccgatctgtgcctggacagggactgcaatggatgggctggattagccacgagggcgacaagaaagtgatcgtggaacggttcaaggccaaagtgaccatcgactgggacagaagcaccaacaccgcctacctgcagctgagcggactgacatctggcgataccgccgtgtactactgtgccaagggcagcaagcaccggctgagagattacgccctgtacgacgatgacggcgccctgaattgggccgtcgatgtggactacctgagcaacctggaattctggggccagggaacagccgtgacagtgtcttccggcggaggtggaagtggtggcggcggatctggcggcggtgggtccggaggtggtggatctgaacctaagagcagcgacaagacccacacctgtcctccatgtcctgctccagaactgctcggcggaccttccgtgttcctgtttcctccaaagcctaaggacaccctgatgatcagcagaacccctgaagtgacctgcgtggtggtggatgtgtctcacgaggaccccgaagtgaagttcaattggtacgtggacggcgtggaagtgcacaacgccaagaccaagcctagagaggaacagtacaacagcacctacagagtggtgtccgtgctgacagtgctgcaccaggattggctgaacggcaaagagtacaagtgcaaggtgtccaacaaggccctgcctgctcctatcgagaaaaccatcagcaaggccaagggccagcctagggaaccccaggtttacacactgcctccaagccgcgacgaactgaccaagaaccaggtgtccctgacctgcctcgtgaagggcttctacccttccgatatcgccgtggaatgggagagcaatggccagcctgagaacaactacaagacaacccctcctgtgctggacagcgacggctcattcttcctgtacagcaagctgactgtggataagtcccggtggcagcagggcaacgtgttcagctgttctgtgatgcacgaagccctgcacaaccactacacccagaaaagcctgtctctgagccccggcaagtgataaggatccgatctggtactgcatgcacgcaatgctagctgcccctttcccgtcctgggtaccccgagtctcccccgacctcgggtcccaggtatgctcccacctccacctgccccactcaccacctctgctagttccagacacctcccaagcacgcagcaatgcagctcaaaacgcttagcctagccacacccccacgggaaacagcagtgattaacctttagcaataaacgaaagtttaactaagctatactaaccccagggttggtcaatttcgtgccagccacaccctcgagctagcaaaaaaaaaaaaaaaaaaaaaaaaaaaaaagcatatgactaaaaaaaaaaaaaaaaaaaaaaaaaaaaaaaaaaaaaaaaaaaaaaaaaaaaaaaaaaaaaaaaaaaaaa

SEQ ID NO: 1176 - RNA, 2114 nt, synthetic construct
  source 1..2114: mol_type = other RNA
agaataaactagtattcttctggtccccacagactcagagagaacccgccaccatggattggatctggcgcatcctgtttctcgtgggagctgccacaggcgcccacagcgattttgtgctgacacagtctccccacagcctgagcgttacacctggcgagtctgccagcatcagctgcaagtctagccactctctgatccacggcgaccggaacaactacctggcttggtacgtgcagaagcccggcagatctcctcagctgctgatctacctggccagcagcagagcttctggcgtgcccgatagattttctggcagcggcagcgacaaggacttcaccctgaagatctccagagtggaaaccgaggacgtgggcacctactactgtatgcagggcagagagagcccctggacatttggccagggcaccaaggtggacatcaaaggcggcggaggaagcggaggcggaggttctggtggtggtggctctggtggcggaggctcaggcggtggcggatctcaagttcatctgacacagagcggccctgaagtgcggaagcctggcacaagcgtgaaggtgtcctgtaaagcccctggcaacaccctgaaaacctacgacctgcactgggtccgatctgtgcctggacagggactgcaatggatgggctggattagccacgagggcgacaagaaagtgatcgtggaacggttcaaggccaaagtgaccatcgactgggacagaagcaccaacaccgcctacctgcagctgagcggactgacatctggcgataccgccgtgtactactgtgccaagggcagcaagcaccggctgagagattacgccctgtacgacgatgacggcgccctgaattgggccgtcgatgtggactacctgagcaacctggaattctggggccagggaacagccgtgacagtgtcttccggcggaggtggaagtggtggcggcggatctggcggcggtgggtccggaggtggtggatctgaacctaagagcagcgacaagacccacacctgtcctccatgtcctgctccagaactgctcggcggaccttccgtgttcctgtttcctccaaagcctaaggacaccctgatgatcagcagaacccctgaagtgacctgcgtggtggtggatgtgtctcacgaggaccccgaagtgaagttcaattggtacgtggacggcgtggaagtgcacaacgccaagaccaagcctagagaggaacagtacaacagcacctacagagtggtgtccgtgctgacagtgctgcaccaggattggctgaacggcaaagagtacaagtgcaaggtgtccaacaaggccctgcctgctcctatcgagaaaaccatcagcaaggccaagggccagcctagggaaccccaggtttacacactgcctccaagccgcgacgaactgaccaagaaccaggtgtccctgacctgcctcgtgaagggcttctacccttccgatatcgccgtggaatgggagagcaatggccagcctgagaacaactacaagacaacccctcctgtgctggacagcgacggctcattcttcctgtacagcaagctgaccgtggacaagtccagatggcagcagggcaacgtgttcagctgtagcgtgctgcacgaagccctgcacagccactacacccagaaaagcctgtctctgagccccggcaaatgataaggatccgatctggtactgcatgcacgcaatgctagctgcccctttcccgtcctgggtaccccgagtctcccccgacctcgggtcccaggtatgctcccacctccacctgccccactcaccacctctgctagttccagacacctcccaagcacgcagcaatgcagctcaaaacgcttagcctagccacacccccacgggaaacagcagtgattaacctttagcaataaacgaaagtttaactaagctatactaaccccagggttggtcaatttcgtgccagccacaccctcgagctagcaaaaaaaaaaaaaaaaaaaaaaaaaaaaaagcatatgactaaaaaaaaaaaaaaaaaaaaaaaaaaaaaaaaaaaaaaaaaaaaaaaaaaaaaaaaaaaaaaaaaaaaaa

SEQ ID NO: 1177 - RNA, 2114 nt, synthetic construct
  source 1..2114: mol_type = other RNA
agaataaactagtattcttctggtccccacagactcagagagaacccgccaccatggattggatctggcgcatcctgtttctcgtgggagctgccacaggcgcccacagcgattttgtgctgacacagtctccccacagcctgagcgttacacctggcgagtctgccagcatcagctgcaagtctagccactctctgatccacggcgaccggaacaactacctggcttggtacgtgcagaagcccggcagatctcctcagctgctgatctacctggccagcagcagagcttctggcgtgcccgatagattttctggcagcggcagcgacaaggacttcaccctgaagatctccagagtggaaaccgaggacgtgggcacctactactgtatgcagggcagagagagcccctggacatttggccagggcaccaaggtggacatcaaaggcggcggaggaagcggaggcggaggttctggtggtggtggctctggtggcggaggctcaggcggtggcggatctcaagttcatctgacacagagcggccctgaagtgcggaagcctggcacaagcgtgaaggtgtcctgtaaagcccctggcaacaccctgaaaacctacgacctgcactgggtccgatctgtgcctggacagggactgcaatggatgggctggattagccacgagggcgacaagaaagtgatcgtggaacggttcaaggccaaagtgaccatcgactgggacagaagcaccaacaccgcctacctgcagctgagcggactgacatctggcgataccgccgtgtactactgtgccaagggcagcaagcaccggctgagagattacgccctgtacgacgatgacggcgccctgaattgggccgtcgatgtggactacctgagcaacctggaattctggggccagggaacagccgtgacagtgtcttccggcggaggtggaagtggtggcggcggatctggcggcggtgggtccggaggtggtggatctgaacctaagagcagcgacaagacccacacctgtcctccatgtcctgctccagaactgctggccggaccttccgtgttcctgtttcctccaaagcctaaggacaccctgatgatcagcagaacccctgaagtgacctgcgtggtggtggatgtgtctcacgaggaccccgaagtgaagttcaattggtacgtggacggcgtggaagtgcacaatgccaagaccaagcctagagaggaacagtacaacagcacctacagagtggtgtccgtgctgaccgtgctgcaccaggattggctgaacggcaaagagtacaagtgcaaggtgtccaacaaggccctgcctctgcctgaggaaaagaccatcagcaaggccaagggccagcctagggaaccccaggtttacacactgcctccaagccgcgacgaactgaccaagaaccaggtgtccctgacctgcctcgtgaagggcttctacccttccgatatcgccgtggaatgggagagcaatggccagcctgagaacaactacaagacaacccctcctgtgctggacagcgacggctcattcttcctgtacagcaagctgaccgtggacaagtccagatggcagcagggcaacgtgttcagctgtagcgtgctgcacgaagccctgcacagccactacacccagaaaagcctgtctctgagccccggcaaatgataaggatccgatctggtactgcatgcacgcaatgctagctgcccctttcccgtcctgggtaccccgagtctcccccgacctcgggtcccaggtatgctcccacctccacctgccccactcaccacctctgctagttccagacacctcccaagcacgcagcaatgcagctcaaaacgcttagcctagccacacccccacgggaaacagcagtgattaacctttagcaataaacgaaagtttaactaagctatactaaccccagggttggtcaatttcgtgccagccacaccctcgagctagcaaaaaaaaaaaaaaaaaaaaaaaaaaaaaagcatatgactaaaaaaaaaaaaaaaaaaaaaaaaaaaaaaaaaaaaaaaaaaaaaaaaaaaaaaaaaaaaaaaaaaaaaa

SEQ ID NO: 1178 - RNA, 2114 nt, synthetic construct
  source 1..2114: mol_type = other RNA
agaataaactagtattcttctggtccccacagactcagagagaacccgccaccatggattggatctggcgcatcctgtttctcgtgggagctgccacaggcgcccacagcgattttgtgctgacacagtctccccacagcctgagcgttacacctggcgagtctgccagcatcagctgcaagtctagccactctctgatccacggcgaccggaacaactacctggcttggtacgtgcagaagcccggcagatctcctcagctgctgatctacctggccagcagcagagcttctggcgtgcccgatagattttctggcagcggcagcgacaaggacttcaccctgaagatctccagagtggaaaccgaggacgtgggcacctactactgtatgcagggcagagagagcccctggacatttggccagggcaccaaggtggacatcaaaggcggcggaggaagcggaggcggaggttctggtggtggtggctctggtggcggaggctcaggcggtggcggatctcaagttcatctgacacagagcggccctgaagtgcggaagcctggcacaagcgtgaaggtgtcctgtaaagcccctggcaacaccctgaaaacctacgacctgcactgggtccgatctgtgcctggacagggactgcaatggatgggctggattagccacgagggcgacaagaaagtgatcgtggaacggttcaaggccaaagtgaccatcgactgggacagaagcaccaacaccgcctacctgcagctgagcggactgacatctggcgataccgccgtgtactactgtgccaagggcagcaagcaccggctgagagattacgccctgtacgacgatgacggcgccctgaattgggccgtcgatgtggactacctgagcaacctggaattctggggccagggaacagccgtgacagtgtcttccggcggaggtggaagtggtggcggcggatctggcggcggtgggtccggaggtggtggatctgaacctaagagcagcgacaagacccacacctgtcctccatgtcctgctccagaactgctggccggaccttccgtgttcctgtttcctccaaagcctaaggacaccctgatgatcagcagaacccctgaagtgacctgcgtggtggtggatgtgtctcacgaggaccctgaagtgaagttcaattggtacgtggacggcgtggaagtgcacaacgccaagaccaagcctagagaggaacagtacaacagcacctacagagtggtgtccgtgctgaccgtgctgcaccaggattggctgaacggcaaagagtacaagtgcaaggtgtccaacaaggccctgcctgcccctgaggaaaagaccatcagcaaggccaagggccagcctagggaaccccaggtttacacactgcctccaagccgcgacgaactgaccaagaaccaggtgtccctgacctgcctcgtgaagggcttctacccttccgatatcgccgtggaatgggagagcaatggccagcctgagaacaactacaagacaacccctcctgtgctggacagcgacggctcattcttcctgtacagcaagctgaccgtggacaagtccagatggcagcagggcaacgtgttcagctgtagcgtgctgcacgaagccctgcacagccactacacccagaaaagcctgtctctgagccccggcaaatgataaggatccgatctggtactgcatgcacgcaatgctagctgcccctttcccgtcctgggtaccccgagtctcccccgacctcgggtcccaggtatgctcccacctccacctgccccactcaccacctctgctagttccagacacctcccaagcacgcagcaatgcagctcaaaacgcttagcctagccacacccccacgggaaacagcagtgattaacctttagcaataaacgaaagtttaactaagctatactaaccccagggttggtcaatttcgtgccagccacaccctcgagctagcaaaaaaaaaaaaaaaaaaaaaaaaaaaaaagcatatgactaaaaaaaaaaaaaaaaaaaaaaaaaaaaaaaaaaaaaaaaaaaaaaaaaaaaaaaaaaaaaaaaaaaaaa

SEQ ID NO: 1179 - RNA, 2114 nt, synthetic construct
  source 1..2114: mol_type = other RNA
agaataaactagtattcttctggtccccacagactcagagagaacccgccaccatggattggatctggcgcatcctgtttctcgtgggagctgccacaggcgcccacagcgattttgtgctgacacagtctccccacagcctgagcgttacacctggcgagtctgccagcatcagctgcaagtctagccactctctgatccacggcgaccggaacaactacctggcttggtacgtgcagaagcccggcagatctcctcagctgctgatctacctggccagcagcagagcttctggcgtgcccgatagattttctggcagcggcagcgacaaggacttcaccctgaagatctccagagtggaaaccgaggacgtgggcacctactactgtatgcagggcagagagagcccctggacatttggccagggcaccaaggtggacatcaaaggcggcggaggaagcggaggcggaggttctggtggtggtggctctggtggcggaggctcaggcggtggcggatctcaagttcatctgacacagagcggccctgaagtgcggaagcctggcacaagcgtgaaggtgtcctgtaaagcccctggcaacaccctgaaaacctacgacctgcactgggtccgatctgtgcctggacagggactgcaatggatgggctggattagccacgagggcgacaagaaagtgatcgtggaacggttcaaggccaaagtgaccatcgactgggacagaagcaccaacaccgcctacctgcagctgagcggactgacatctggcgataccgccgtgtactactgtgccaagggcagcaagcaccggctgagagattacgccctgtacgacgatgacggcgccctgaattgggccgtcgatgtggactacctgagcaacctggaattctggggccagggaacagccgtgacagtgtcttccggcggaggtggaagtggtggcggcggatctggcggcggtgggtccggaggtggtggatctgaacctaagagcagcgacaagacccacacctgtcctccatgtcctgctccagaactgctggccggaccttccgtgttcctgtttcctccaaagcctaaggacaccctgatgatcagcagaacccctgaagtgacctgcgtggtggtggatgtgtctcacgaggaccctgaagtgaagttcaattggtacgtggacggcgtggaagtgcacaacgccaagaccaagcctagagaggaacagtacaacagcacctacagagtggtgtccgtgctgaccgtgctgcaccaggattggctgaacggcaaagagtacaagtgcaaggtgtccaacaaggccctgcctgcccctatcgaaaagaccatcagcaaggccaagggccagcctagggaaccccaggtttacacactgcctccaagccgcgacgaactgaccaagaaccaggtgtccctgacctgcctcgtgaagggcttctacccttccgatatcgccgtggaatgggagagcaatggccagcctgagaacaactacaagacaacccctcctgtgctggacagcgacggctcattcttcctgtacagcaagctgaccgtggacaagtccagatggcagcagggcaacgtgttcagctgtagcgtgctgcacgaagccctgcacagccactacacccagaaaagcctgtctctgagccccggcaaatgataaggatccgatctggtactgcatgcacgcaatgctagctgcccctttcccgtcctgggtaccccgagtctcccccgacctcgggtcccaggtatgctcccacctccacctgccccactcaccacctctgctagttccagacacctcccaagcacgcagcaatgcagctcaaaacgcttagcctagccacacccccacgggaaacagcagtgattaacctttagcaataaacgaaagtttaactaagctatactaaccccagggttggtcaatttcgtgccagccacaccctcgagctagcaaaaaaaaaaaaaaaaaaaaaaaaaaaaaagcatatgactaaaaaaaaaaaaaaaaaaaaaaaaaaaaaaaaaaaaaaaaaaaaaaaaaaaaaaaaaaaaaaaaaaaaaa

SEQ ID NO: 1180 - RNA, 2114 nt, synthetic construct
  source 1..2114: mol_type = other RNA
agaataaactagtattcttctggtccccacagactcagagagaacccgccaccatggattggatctggcgcatcctgtttctcgtgggagctgccacaggcgcccacagcgattttgtgctgacacagtctccccacagcctgagcgttacacctggcgagtctgccagcatcagctgcaagtctagccactctctgatccacggcgaccggaacaactacctggcttggtacgtgcagaagcccggcagatctcctcagctgctgatctacctggccagcagcagagcttctggcgtgcccgatagattttctggcagcggcagcgacaaggacttcaccctgaagatctccagagtggaaaccgaggacgtgggcacctactactgtatgcagggcagagagagcccctggacatttggccagggcaccaaggtggacatcaaaggcggcggaggaagcggaggcggaggttctggtggtggtggctctggtggcggaggctcaggcggtggcggatctcaagttcatctgacacagagcggccctgaagtgcggaagcctggcacaagcgtgaaggtgtcctgtaaagcccctggcaacaccctgaaaacctacgacctgcactgggtccgatctgtgcctggacagggactgcaatggatgggctggattagccacgagggcgacaagaaagtgatcgtggaacggttcaaggccaaagtgaccatcgactgggacagaagcaccaacaccgcctacctgcagctgagcggactgacatctggcgataccgccgtgtactactgtgccaagggcagcaagcaccggctgagagattacgccctgtacgacgatgacggcgccctgaattgggccgtcgatgtggactacctgagcaacctggaattctggggccagggaacagccgtgacagtgtcttccggcggaggtggaagtggtggcggcggatctggcggcggtgggtccggaggtggtggatctgaacctaagagcagcgacaagacccacacctgtcctccatgtcctgctccagaactgctgggcggaccttccgtgttcctgtttcctccaaagcctaaggacaccctgatgatcagcagaacccctgaagtgacctgcgtggtggtggatgtgtctcacgaggaccctgaagtgaagttcaattggtacgtggacggcgtggaagtgcacaacgccaagaccaagcctagagaggaacagtacaacagcacctacagagtggtgtccgtgctgaccgtgctgcaccaggattggctgaacggcaaagagtacaagtgcaaggtgtccaacaaggccctgcctgcccctgaggaaaagaccatcagcaaggccaagggccagcctagggaaccccaggtttacacactgcctccaagccgcgacgaactgaccaagaaccaggtgtccctgacctgcctcgtgaagggcttctacccttccgatatcgccgtggaatgggagagcaatggccagcctgagaacaactacaagacaacccctcctgtgctggacagcgacggctcattcttcctgtacagcaagctgaccgtggacaagtccagatggcagcagggcaacgtgttcagctgtagcgtgctgcacgaagccctgcacagccactacacccagaaaagcctgtctctgagccccggcaaatgataaggatccgatctggtactgcatgcacgcaatgctagctgcccctttcccgtcctgggtaccccgagtctcccccgacctcgggtcccaggtatgctcccacctccacctgccccactcaccacctctgctagttccagacacctcccaagcacgcagcaatgcagctcaaaacgcttagcctagccacacccccacgggaaacagcagtgattaacctttagcaataaacgaaagtttaactaagctatactaaccccagggttggtcaatttcgtgccagccacaccctcgagctagcaaaaaaaaaaaaaaaaaaaaaaaaaaaaaagcatatgactaaaaaaaaaaaaaaaaaaaaaaaaaaaaaaaaaaaaaaaaaaaaaaaaaaaaaaaaaaaaaaaaaaaaaa

SEQ ID NO: 1181 - RNA, 2114 nt, synthetic construct
  source 1..2114: mol_type = other RNA
agaataaactagtattcttctggtccccacagactcagagagaacccgccaccatggattggatctggcgcatcctgtttctcgtgggagctgccacaggcgcccacagcgattttgtgctgacacagtctccccacagcctgagcgttacacctggcgagtctgccagcatcagctgcaagtctagccactctctgatccacggcgaccggaacaactacctggcttggtacgtgcagaagcccggcagatctcctcagctgctgatctacctggccagcagcagagcttctggcgtgcccgatagattttctggcagcggcagcgacaaggacttcaccctgaagatctccagagtggaaaccgaggacgtgggcacctactactgtatgcagggcagagagagcccctggacatttggccagggcaccaaggtggacatcaaaggcggcggaggaagcggaggcggaggttctggtggtggtggctctggtggcggaggctcaggcggtggcggatctcaagttcatctgacacagagcggccctgaagtgcggaagcctggcacaagcgtgaaggtgtcctgtaaagcccctggcaacaccctgaaaacctacgacctgcactgggtccgatctgtgcctggacagggactgcaatggatgggctggattagccacgagggcgacaagaaagtgatcgtggaacggttcaaggccaaagtgaccatcgactgggacagaagcaccaacaccgcctacctgcagctgagcggactgacatctggcgataccgccgtgtactactgtgccaagggcagcaagcaccggctgagagattacgccctgtacgacgatgacggcgccctgaattgggccgtcgatgtggactacctgagcaacctggaattctggggccagggaacagccgtgacagtgtcttccggcggaggtggaagtggtggcggcggatctggcggcggtgggtccggaggtggtggatctgaacctaagagcagcgacaagacccacacctgtcctccatgtcctgctccagaactgctcggcggaccttccgtgttcctgtttcctccaaagcctaaggacaccctgatgatcagcagaacccctgaagtgacctgcgtggtggtggatgtgtctcacgaggaccccgaagtgaagttcaattggtacgtggacggcgtggaagtgcacaacgccaagaccaagcctagagaggaacagtacaacagcacctacagagtggtgtccgtgctgacagtgctgcaccaggattggctgaacggcaaagagtacaagtgcaaggtgtccaacaaggccctgcctgctcctatcgagaaaaccatcagcaaggccaagggccagcctcgcgaacctcaagtctgtacactgcctcctagccgcgacgaactgaccaagaaccaggtgtccctgagctgcgccgtgaagggcttttacccttccgatatcgccgtggaatgggagagcaatggccagcctgagaacaactacaagacaacccctcctgtgctggacagcgacggctcattcttcctggtgtccaagctgacagtggacaagagcagatggcagcagggcaacgtgttcagctgcagcgtgctgcatgaagccctgcacagccactacacccagaagtccctgtctctgagccccggcaagtgataaggatccgatctggtactgcatgcacgcaatgctagctgcccctttcccgtcctgggtaccccgagtctcccccgacctcgggtcccaggtatgctcccacctccacctgccccactcaccacctctgctagttccagacacctcccaagcacgcagcaatgcagctcaaaacgcttagcctagccacacccccacgggaaacagcagtgattaacctttagcaataaacgaaagtttaactaagctatactaaccccagggttggtcaatttcgtgccagccacaccctcgagctagcaaaaaaaaaaaaaaaaaaaaaaaaaaaaaagcatatgactaaaaaaaaaaaaaaaaaaaaaaaaaaaaaaaaaaaaaaaaaaaaaaaaaaaaaaaaaaaaaaaaaaaaaa

SEQ ID NO: 1182 - RNA, 2114 nt, synthetic construct
  source 1..2114: mol_type = other RNA
agaataaactagtattcttctggtccccacagactcagagagaacccgccaccatggattggatctggcgcatcctgtttctcgtgggagctgccacaggcgcccacagcgattttgtgctgacacagtctccccacagcctgagcgttacacctggcgagtctgccagcatcagctgcaagtctagccactctctgatccacggcgaccggaacaactacctggcttggtacgtgcagaagcccggcagatctcctcagctgctgatctacctggccagcagcagagcttctggcgtgcccgatagattttctggcagcggcagcgacaaggacttcaccctgaagatctccagagtggaaaccgaggacgtgggcacctactactgtatgcagggcagagagagcccctggacatttggccagggcaccaaggtggacatcaaaggcggcggaggaagcggaggcggaggttctggtggtggtggctctggtggcggaggctcaggcggtggcggatctcaagttcatctgacacagagcggccctgaagtgcggaagcctggcacaagcgtgaaggtgtcctgtaaagcccctggcaacaccctgaaaacctacgacctgcactgggtccgatctgtgcctggacagggactgcaatggatgggctggattagccacgagggcgacaagaaagtgatcgtggaacggttcaaggccaaagtgaccatcgactgggacagaagcaccaacaccgcctacctgcagctgagcggactgacatctggcgataccgccgtgtactactgtgccaagggcagcaagcaccggctgagagattacgccctgtacgacgatgacggcgccctgaattgggccgtcgatgtggactacctgagcaacctggaattctggggccagggaacagccgtgacagtgtcttccggcggaggtggaagtggtggcggcggatctggcggcggtgggtccggaggtggtggatctgaacctaagagcagcgacaagacccacacctgtcctccatgtcctgctccagaactgctggccggaccttccgtgttcctgtttcctccaaagcctaaggacaccctgatgatcagcagaacccctgaagtgacctgcgtggtggtggatgtgtctcacgaggaccccgaagtgaagttcaattggtacgtggacggcgtggaagtgcacaatgccaagaccaagcctagagaggaacagtacaacagcacctacagagtggtgtccgtgctgaccgtgctgcaccaggattggctgaacggcaaagagtacaagtgcaaggtgtccaacaaggccctgcctctgcctgaggaaaagaccatcagcaaggccaagggccagcctcgcgaacctcaagtctgtacactgcctcctagccgcgacgaactgaccaagaaccaggtgtccctgagctgcgccgtgaagggcttttacccttccgatatcgccgtggaatgggagagcaatggccagcctgagaacaactacaagacaacccctcctgtgctggacagcgacggctcattcttcctggtgtccaagctgacagtggacaagagcagatggcagcagggcaacgtgttcagctgcagcgtgctgcatgaagccctgcacagccactacacccagaagtccctgtctctgagccccggcaagtgataaggatccgatctggtactgcatgcacgcaatgctagctgcccctttcccgtcctgggtaccccgagtctcccccgacctcgggtcccaggtatgctcccacctccacctgccccactcaccacctctgctagttccagacacctcccaagcacgcagcaatgcagctcaaaacgcttagcctagccacacccccacgggaaacagcagtgattaacctttagcaataaacgaaagtttaactaagctatactaaccccagggttggtcaatttcgtgccagccacaccctcgagctagcaaaaaaaaaaaaaaaaaaaaaaaaaaaaaagcatatgactaaaaaaaaaaaaaaaaaaaaaaaaaaaaaaaaaaaaaaaaaaaaaaaaaaaaaaaaaaaaaaaaaaaaaa

SEQ ID NO: 1183 - RNA, 2114 nt, synthetic construct
  source 1..2114: mol_type = other RNA
agaataaactagtattcttctggtccccacagactcagagagaacccgccaccatggattggatctggcgcatcctgtttctcgtgggagctgccacaggcgcccacagcgattttgtgctgacacagtctccccacagcctgagcgttacacctggcgagtctgccagcatcagctgcaagtctagccactctctgatccacggcgaccggaacaactacctggcttggtacgtgcagaagcccggcagatctcctcagctgctgatctacctggccagcagcagagcttctggcgtgcccgatagattttctggcagcggcagcgacaaggacttcaccctgaagatctccagagtggaaaccgaggacgtgggcacctactactgtatgcagggcagagagagcccctggacatttggccagggcaccaaggtggacatcaaaggcggcggaggaagcggaggcggaggttctggtggtggtggctctggtggcggaggctcaggcggtggcggatctcaagttcatctgacacagagcggccctgaagtgcggaagcctggcacaagcgtgaaggtgtcctgtaaagcccctggcaacaccctgaaaacctacgacctgcactgggtccgatctgtgcctggacagggactgcaatggatgggctggattagccacgagggcgacaagaaagtgatcgtggaacggttcaaggccaaagtgaccatcgactgggacagaagcaccaacaccgcctacctgcagctgagcggactgacatctggcgataccgccgtgtactactgtgccaagggcagcaagcaccggctgagagattacgccctgtacgacgatgacggcgccctgaattgggccgtcgatgtggactacctgagcaacctggaattctggggccagggaacagccgtgacagtgtcttccggcggaggtggaagtggtggcggcggatctggcggcggtgggtccggaggtggtggatctgaacctaagagcagcgacaagacccacacctgtcctccatgtcctgctccagaactgctggccggaccttccgtgttcctgtttcctccaaagcctaaggacaccctgatgatcagcagaacccctgaagtgacctgcgtggtggtggatgtgtctcacgaggaccctgaagtgaagttcaattggtacgtggacggcgtggaagtgcacaacgccaagaccaagcctagagaggaacagtacaacagcacctacagagtggtgtccgtgctgaccgtgctgcaccaggattggctgaacggcaaagagtacaagtgcaaggtgtccaacaaggccctgcctgcccctgaggaaaagaccatcagcaaggccaagggccagcctcgcgaacctcaagtctgtacactgcctcctagccgcgacgaactgaccaagaaccaggtgtccctgagctgcgccgtgaagggcttttacccttccgatatcgccgtggaatgggagagcaatggccagcctgagaacaactacaagacaacccctcctgtgctggacagcgacggctcattcttcctggtgtccaagctgacagtggacaagagcagatggcagcagggcaacgtgttcagctgcagcgtgctgcatgaagccctgcacagccactacacccagaagtccctgtctctgagccccggcaagtgataaggatccgatctggtactgcatgcacgcaatgctagctgcccctttcccgtcctgggtaccccgagtctcccccgacctcgggtcccaggtatgctcccacctccacctgccccactcaccacctctgctagttccagacacctcccaagcacgcagcaatgcagctcaaaacgcttagcctagccacacccccacgggaaacagcagtgattaacctttagcaataaacgaaagtttaactaagctatactaaccccagggttggtcaatttcgtgccagccacaccctcgagctagcaaaaaaaaaaaaaaaaaaaaaaaaaaaaaagcatatgactaaaaaaaaaaaaaaaaaaaaaaaaaaaaaaaaaaaaaaaaaaaaaaaaaaaaaaaaaaaaaaaaaaaaaa

SEQ ID NO: 1184 - RNA, 2114 nt, synthetic construct
  source 1..2114: mol_type = other RNA
agaataaactagtattcttctggtccccacagactcagagagaacccgccaccatggattggatctggcgcatcctgtttctcgtgggagctgccacaggcgcccacagcgattttgtgctgacacagtctccccacagcctgagcgttacacctggcgagtctgccagcatcagctgcaagtctagccactctctgatccacggcgaccggaacaactacctggcttggtacgtgcagaagcccggcagatctcctcagctgctgatctacctggccagcagcagagcttctggcgtgcccgatagattttctggcagcggcagcgacaaggacttcaccctgaagatctccagagtggaaaccgaggacgtgggcacctactactgtatgcagggcagagagagcccctggacatttggccagggcaccaaggtggacatcaaaggcggcggaggaagcggaggcggaggttctggtggtggtggctctggtggcggaggctcaggcggtggcggatctcaagttcatctgacacagagcggccctgaagtgcggaagcctggcacaagcgtgaaggtgtcctgtaaagcccctggcaacaccctgaaaacctacgacctgcactgggtccgatctgtgcctggacagggactgcaatggatgggctggattagccacgagggcgacaagaaagtgatcgtggaacggttcaaggccaaagtgaccatcgactgggacagaagcaccaacaccgcctacctgcagctgagcggactgacatctggcgataccgccgtgtactactgtgccaagggcagcaagcaccggctgagagattacgccctgtacgacgatgacggcgccctgaattgggccgtcgatgtggactacctgagcaacctggaattctggggccagggaacagccgtgacagtgtcttccggcggaggtggaagtggtggcggcggatctggcggcggtgggtccggaggtggtggatctgaacctaagagcagcgacaagacccacacctgtcctccatgtcctgctccagaactgctggccggaccttccgtgttcctgtttcctccaaagcctaaggacaccctgatgatcagcagaacccctgaagtgacctgcgtggtggtggatgtgtctcacgaggaccctgaagtgaagttcaattggtacgtggacggcgtggaagtgcacaacgccaagaccaagcctagagaggaacagtacaacagcacctacagagtggtgtccgtgctgaccgtgctgcaccaggattggctgaacggcaaagagtacaagtgcaaggtgtccaacaaggccctgcctgcccctatcgaaaagaccatcagcaaggccaagggccagcctcgcgaacctcaagtctgtacactgcctcctagccgcgacgaactgaccaagaaccaggtgtccctgagctgcgccgtgaagggcttttacccttccgatatcgccgtggaatgggagagcaatggccagcctgagaacaactacaagacaacccctcctgtgctggacagcgacggctcattcttcctggtgtccaagctgacagtggacaagagcagatggcagcagggcaacgtgttcagctgcagcgtgctgcatgaagccctgcacagccactacacccagaagtccctgtctctgagccccggcaagtgataaggatccgatctggtactgcatgcacgcaatgctagctgcccctttcccgtcctgggtaccccgagtctcccccgacctcgggtcccaggtatgctcccacctccacctgccccactcaccacctctgctagttccagacacctcccaagcacgcagcaatgcagctcaaaacgcttagcctagccacacccccacgggaaacagcagtgattaacctttagcaataaacgaaagtttaactaagctatactaaccccagggttggtcaatttcgtgccagccacaccctcgagctagcaaaaaaaaaaaaaaaaaaaaaaaaaaaaaagcatatgactaaaaaaaaaaaaaaaaaaaaaaaaaaaaaaaaaaaaaaaaaaaaaaaaaaaaaaaaaaaaaaaaaaaaaa

SEQ ID NO: 1185 - RNA, 2114 nt, synthetic construct
  source 1..2114: mol_type = other RNA
agaataaactagtattcttctggtccccacagactcagagagaacccgccaccatggattggatctggcgcatcctgtttctcgtgggagctgccacaggcgcccacagcgattttgtgctgacacagtctccccacagcctgagcgttacacctggcgagtctgccagcatcagctgcaagtctagccactctctgatccacggcgaccggaacaactacctggcttggtacgtgcagaagcccggcagatctcctcagctgctgatctacctggccagcagcagagcttctggcgtgcccgatagattttctggcagcggcagcgacaaggacttcaccctgaagatctccagagtggaaaccgaggacgtgggcacctactactgtatgcagggcagagagagcccctggacatttggccagggcaccaaggtggacatcaaaggcggcggaggaagcggaggcggaggttctggtggtggtggctctggtggcggaggctcaggcggtggcggatctcaagttcatctgacacagagcggccctgaagtgcggaagcctggcacaagcgtgaaggtgtcctgtaaagcccctggcaacaccctgaaaacctacgacctgcactgggtccgatctgtgcctggacagggactgcaatggatgggctggattagccacgagggcgacaagaaagtgatcgtggaacggttcaaggccaaagtgaccatcgactgggacagaagcaccaacaccgcctacctgcagctgagcggactgacatctggcgataccgccgtgtactactgtgccaagggcagcaagcaccggctgagagattacgccctgtacgacgatgacggcgccctgaattgggccgtcgatgtggactacctgagcaacctggaattctggggccagggaacagccgtgacagtgtcttccggcggaggtggaagtggtggcggcggatctggcggcggtgggtccggaggtggtggatctgaacctaagagcagcgacaagacccacacctgtcctccatgtcctgctccagaactgctgggcggaccttccgtgttcctgtttcctccaaagcctaaggacaccctgatgatcagcagaacccctgaagtgacctgcgtggtggtggatgtgtctcacgaggaccctgaagtgaagttcaattggtacgtggacggcgtggaagtgcacaacgccaagaccaagcctagagaggaacagtacaacagcacctacagagtggtgtccgtgctgaccgtgctgcaccaggattggctgaacggcaaagagtacaagtgcaaggtgtccaacaaggccctgcctgcccctgaggaaaagaccatcagcaaggccaagggccagcctcgcgaacctcaagtctgtacactgcctcctagccgcgacgaactgaccaagaaccaggtgtccctgagctgcgccgtgaagggcttttacccttccgatatcgccgtggaatgggagagcaatggccagcctgagaacaactacaagacaacccctcctgtgctggacagcgacggctcattcttcctggtgtccaagctgacagtggacaagagcagatggcagcagggcaacgtgttcagctgcagcgtgctgcatgaagccctgcacagccactacacccagaagtccctgtctctgagccccggcaagtgataaggatccgatctggtactgcatgcacgcaatgctagctgcccctttcccgtcctgggtaccccgagtctcccccgacctcgggtcccaggtatgctcccacctccacctgccccactcaccacctctgctagttccagacacctcccaagcacgcagcaatgcagctcaaaacgcttagcctagccacacccccacgggaaacagcagtgattaacctttagcaataaacgaaagtttaactaagctatactaaccccagggttggtcaatttcgtgccagccacaccctcgagctagcaaaaaaaaaaaaaaaaaaaaaaaaaaaaaagcatatgactaaaaaaaaaaaaaaaaaaaaaaaaaaaaaaaaaaaaaaaaaaaaaaaaaaaaaaaaaaaaaaaaaaaaaa

SEQ ID NO: 1186 - RNA, 2114 nt, synthetic construct
  source 1..2114: mol_type = other RNA
agaataaactagtattcttctggtccccacagactcagagagaacccgccaccatggattggatctggcgcatcctgtttctcgtgggagctgccacaggcgcccacagcgattttgtgctgacacagtctccccacagcctgagcgttacacctggcgagtctgccagcatcagctgcaagtctagccactctctgatccacggcgaccggaacaactacctggcttggtacgtgcagaagcccggcagatctcctcagctgctgatctacctggccagcagcagagcttctggcgtgcccgatagattttctggcagcggcagcgacaaggacttcaccctgaagatctccagagtggaaaccgaggacgtgggcacctactactgtatgcagggcagagagagcccctggacatttggccagggcaccaaggtggacatcaaaggcggcggaggaagcggaggcggaggttctggtggtggtggctctggtggcggaggctcaggcggtggcggatctcaagttcatctgacacagagcggccctgaagtgcggaagcctggcacaagcgtgaaggtgtcctgtaaagcccctggcaacaccctgaaaacctacgacctgcactgggtccgatctgtgcctggacagggactgcaatggatgggctggattagccacgagggcgacaagaaagtgatcgtggaacggttcaaggccaaagtgaccatcgactgggacagaagcaccaacaccgcctacctgcagctgagcggactgacatctggcgataccgccgtgtactactgtgccaagggcagcaagcaccggctgagagattacgccctgtacgacgatgacggcgccctgaattgggccgtcgatgtggactacctgagcaacctggaattctggggccagggaacagccgtgacagtgtcttccggcggaggtggaagtggtggcggcggatctggcggcggtgggtccggaggtggtggatctgaacctaagagcagcgacaagacccacacctgtcctccatgtcctgctccagaactgctcggcggaccttccgtgttcctgtttcctccaaagcctaaggacaccctgatgatcagcagaacccctgaagtgacctgcgtggtggtggatgtgtctcacgaggaccccgaagtgaagttcaattggtacgtggacggcgtggaagtgcacaacgccaagaccaagcctagagaggaacagtacaacagcacctacagagtggtgtccgtgctgacagtgctgcaccaggattggctgaacggcaaagagtacaagtgcaaggtgtccaacaaggccctgcctgctcctatcgagaaaaccatcagcaaggccaagggccagcctagggaaccccaggtttacaccctgcctccatgccgcgacgaactgaccaagaaccaggtgtccctgtggtgcctggtcaagggcttctacccttccgatatcgccgtggaatgggagagcaatggccagcctgagaacaactacaagacaacccctcctgtgctggacagcgacggctcattcttcctgtacagcaagctgacagtggacaagagcagatggcagcagggcaacgtgttcagctgcagcgtgctgcatgaagccctgcacagccactacacccagaagtccctgtctctgagccccggcaagtgataaggatccgatctggtactgcatgcacgcaatgctagctgcccctttcccgtcctgggtaccccgagtctcccccgacctcgggtcccaggtatgctcccacctccacctgccccactcaccacctctgctagttccagacacctcccaagcacgcagcaatgcagctcaaaacgcttagcctagccacacccccacgggaaacagcagtgattaacctttagcaataaacgaaagtttaactaagctatactaaccccagggttggtcaatttcgtgccagccacaccctcgagctagcaaaaaaaaaaaaaaaaaaaaaaaaaaaaaagcatatgactaaaaaaaaaaaaaaaaaaaaaaaaaaaaaaaaaaaaaaaaaaaaaaaaaaaaaaaaaaaaaaaaaaaaaa

SEQ ID NO: 1187 - RNA, 2114 nt, synthetic construct
  source 1..2114: mol_type = other RNA
agaataaactagtattcttctggtccccacagactcagagagaacccgccaccatggattggatctggcgcatcctgtttctcgtgggagctgccacaggcgcccacagcgattttgtgctgacacagtctccccacagcctgagcgttacacctggcgagtctgccagcatcagctgcaagtctagccactctctgatccacggcgaccggaacaactacctggcttggtacgtgcagaagcccggcagatctcctcagctgctgatctacctggccagcagcagagcttctggcgtgcccgatagattttctggcagcggcagcgacaaggacttcaccctgaagatctccagagtggaaaccgaggacgtgggcacctactactgtatgcagggcagagagagcccctggacatttggccagggcaccaaggtggacatcaaaggcggcggaggaagcggaggcggaggttctggtggtggtggctctggtggcggaggctcaggcggtggcggatctcaagttcatctgacacagagcggccctgaagtgcggaagcctggcacaagcgtgaaggtgtcctgtaaagcccctggcaacaccctgaaaacctacgacctgcactgggtccgatctgtgcctggacagggactgcaatggatgggctggattagccacgagggcgacaagaaagtgatcgtggaacggttcaaggccaaagtgaccatcgactgggacagaagcaccaacaccgcctacctgcagctgagcggactgacatctggcgataccgccgtgtactactgtgccaagggcagcaagcaccggctgagagattacgccctgtacgacgatgacggcgccctgaattgggccgtcgatgtggactacctgagcaacctggaattctggggccagggaacagccgtgacagtgtcttccggcggaggtggaagtggtggcggcggatctggcggcggtgggtccggaggtggtggatctgaacctaagagcagcgacaagacccacacctgtcctccatgtcctgctccagaactgctggccggaccttccgtgttcctgtttcctccaaagcctaaggacaccctgatgatcagcagaacccctgaagtgacctgcgtggtggtggatgtgtctcacgaggaccccgaagtgaagttcaattggtacgtggacggcgtggaagtgcacaatgccaagaccaagcctagagaggaacagtacaacagcacctacagagtggtgtccgtgctgaccgtgctgcaccaggattggctgaacggcaaagagtacaagtgcaaggtgtccaacaaggccctgcctctgcctgaggaaaagaccatcagcaaggccaagggccagcctagggaaccccaggtttacaccctgcctccatgccgcgacgaactgaccaagaaccaggtgtccctgtggtgcctggtcaagggcttctacccttccgatatcgccgtggaatgggagagcaatggccagcctgagaacaactacaagacaacccctcctgtgctggacagcgacggctcattcttcctgtacagcaagctgacagtggacaagagcagatggcagcagggcaacgtgttcagctgcagcgtgctgcatgaagccctgcacagccactacacccagaagtccctgtctctgagccccggcaagtgataaggatccgatctggtactgcatgcacgcaatgctagctgcccctttcccgtcctgggtaccccgagtctcccccgacctcgggtcccaggtatgctcccacctccacctgccccactcaccacctctgctagttccagacacctcccaagcacgcagcaatgcagctcaaaacgcttagcctagccacacccccacgggaaacagcagtgattaacctttagcaataaacgaaagtttaactaagctatactaaccccagggttggtcaatttcgtgccagccacaccctcgagctagcaaaaaaaaaaaaaaaaaaaaaaaaaaaaaagcatatgactaaaaaaaaaaaaaaaaaaaaaaaaaaaaaaaaaaaaaaaaaaaaaaaaaaaaaaaaaaaaaaaaaaaaaa

SEQ ID NO: 1188 - RNA, 2114 nt, synthetic construct
  source 1..2114: mol_type = other RNA
agaataaactagtattcttctggtccccacagactcagagagaacccgccaccatggattggatctggcgcatcctgtttctcgtgggagctgccacaggcgcccacagcgattttgtgctgacacagtctccccacagcctgagcgttacacctggcgagtctgccagcatcagctgcaagtctagccactctctgatccacggcgaccggaacaactacctggcttggtacgtgcagaagcccggcagatctcctcagctgctgatctacctggccagcagcagagcttctggcgtgcccgatagattttctggcagcggcagcgacaaggacttcaccctgaagatctccagagtggaaaccgaggacgtgggcacctactactgtatgcagggcagagagagcccctggacatttggccagggcaccaaggtggacatcaaaggcggcggaggaagcggaggcggaggttctggtggtggtggctctggtggcggaggctcaggcggtggcggatctcaagttcatctgacacagagcggccctgaagtgcggaagcctggcacaagcgtgaaggtgtcctgtaaagcccctggcaacaccctgaaaacctacgacctgcactgggtccgatctgtgcctggacagggactgcaatggatgggctggattagccacgagggcgacaagaaagtgatcgtggaacggttcaaggccaaagtgaccatcgactgggacagaagcaccaacaccgcctacctgcagctgagcggactgacatctggcgataccgccgtgtactactgtgccaagggcagcaagcaccggctgagagattacgccctgtacgacgatgacggcgccctgaattgggccgtcgatgtggactacctgagcaacctggaattctggggccagggaacagccgtgacagtgtcttccggcggaggtggaagtggtggcggcggatctggcggcggtgggtccggaggtggtggatctgaacctaagagcagcgacaagacccacacctgtcctccatgtcctgctccagaactgctggccggaccttccgtgttcctgtttcctccaaagcctaaggacaccctgatgatcagcagaacccctgaagtgacctgcgtggtggtggatgtgtctcacgaggaccctgaagtgaagttcaattggtacgtggacggcgtggaagtgcacaacgccaagaccaagcctagagaggaacagtacaacagcacctacagagtggtgtccgtgctgaccgtgctgcaccaggattggctgaacggcaaagagtacaagtgcaaggtgtccaacaaggccctgcctgcccctgaggaaaagaccatcagcaaggccaagggccagcctagggaaccccaggtttacaccctgcctccatgccgcgacgaactgaccaagaaccaggtgtccctgtggtgcctggtcaagggcttctacccttccgatatcgccgtggaatgggagagcaatggccagcctgagaacaactacaagacaacccctcctgtgctggacagcgacggctcattcttcctgtacagcaagctgacagtggacaagagcagatggcagcagggcaacgtgttcagctgcagcgtgctgcatgaagccctgcacagccactacacccagaagtccctgtctctgagccccggcaagtgataaggatccgatctggtactgcatgcacgcaatgctagctgcccctttcccgtcctgggtaccccgagtctcccccgacctcgggtcccaggtatgctcccacctccacctgccccactcaccacctctgctagttccagacacctcccaagcacgcagcaatgcagctcaaaacgcttagcctagccacacccccacgggaaacagcagtgattaacctttagcaataaacgaaagtttaactaagctatactaaccccagggttggtcaatttcgtgccagccacaccctcgagctagcaaaaaaaaaaaaaaaaaaaaaaaaaaaaaagcatatgactaaaaaaaaaaaaaaaaaaaaaaaaaaaaaaaaaaaaaaaaaaaaaaaaaaaaaaaaaaaaaaaaaaaaaa

SEQ ID NO: 1189 - RNA, 2114 nt, synthetic construct
  source 1..2114: mol_type = other RNA
agaataaactagtattcttctggtccccacagactcagagagaacccgccaccatggattggatctggcgcatcctgtttctcgtgggagctgccacaggcgcccacagcgattttgtgctgacacagtctccccacagcctgagcgttacacctggcgagtctgccagcatcagctgcaagtctagccactctctgatccacggcgaccggaacaactacctggcttggtacgtgcagaagcccggcagatctcctcagctgctgatctacctggccagcagcagagcttctggcgtgcccgatagattttctggcagcggcagcgacaaggacttcaccctgaagatctccagagtggaaaccgaggacgtgggcacctactactgtatgcagggcagagagagcccctggacatttggccagggcaccaaggtggacatcaaaggcggcggaggaagcggaggcggaggttctggtggtggtggctctggtggcggaggctcaggcggtggcggatctcaagttcatctgacacagagcggccctgaagtgcggaagcctggcacaagcgtgaaggtgtcctgtaaagcccctggcaacaccctgaaaacctacgacctgcactgggtccgatctgtgcctggacagggactgcaatggatgggctggattagccacgagggcgacaagaaagtgatcgtggaacggttcaaggccaaagtgaccatcgactgggacagaagcaccaacaccgcctacctgcagctgagcggactgacatctggcgataccgccgtgtactactgtgccaagggcagcaagcaccggctgagagattacgccctgtacgacgatgacggcgccctgaattgggccgtcgatgtggactacctgagcaacctggaattctggggccagggaacagccgtgacagtgtcttccggcggaggtggaagtggtggcggcggatctggcggcggtgggtccggaggtggtggatctgaacctaagagcagcgacaagacccacacctgtcctccatgtcctgctccagaactgctggccggaccttccgtgttcctgtttcctccaaagcctaaggacaccctgatgatcagcagaacccctgaagtgacctgcgtggtggtggatgtgtctcacgaggaccctgaagtgaagttcaattggtacgtggacggcgtggaagtgcacaacgccaagaccaagcctagagaggaacagtacaacagcacctacagagtggtgtccgtgctgaccgtgctgcaccaggattggctgaacggcaaagagtacaagtgcaaggtgtccaacaaggccctgcctgcccctatcgaaaagaccatcagcaaggccaagggccagcctagggaaccccaggtttacaccctgcctccatgccgcgacgaactgaccaagaaccaggtgtccctgtggtgcctggtcaagggcttctacccttccgatatcgccgtggaatgggagagcaatggccagcctgagaacaactacaagacaacccctcctgtgctggacagcgacggctcattcttcctgtacagcaagctgacagtggacaagagcagatggcagcagggcaacgtgttcagctgcagcgtgctgcatgaagccctgcacagccactacacccagaagtccctgtctctgagccccggcaagtgataaggatccgatctggtactgcatgcacgcaatgctagctgcccctttcccgtcctgggtaccccgagtctcccccgacctcgggtcccaggtatgctcccacctccacctgccccactcaccacctctgctagttccagacacctcccaagcacgcagcaatgcagctcaaaacgcttagcctagccacacccccacgggaaacagcagtgattaacctttagcaataaacgaaagtttaactaagctatactaaccccagggttggtcaatttcgtgccagccacaccctcgagctagcaaaaaaaaaaaaaaaaaaaaaaaaaaaaaagcatatgactaaaaaaaaaaaaaaaaaaaaaaaaaaaaaaaaaaaaaaaaaaaaaaaaaaaaaaaaaaaaaaaaaaaaaa

SEQ ID NO: 1190 - RNA, 2114 nt, synthetic construct
  source 1..2114: mol_type = other RNA
agaataaactagtattcttctggtccccacagactcagagagaacccgccaccatggattggatctggcgcatcctgtttctcgtgggagctgccacaggcgcccacagcgattttgtgctgacacagtctccccacagcctgagcgttacacctggcgagtctgccagcatcagctgcaagtctagccactctctgatccacggcgaccggaacaactacctggcttggtacgtgcagaagcccggcagatctcctcagctgctgatctacctggccagcagcagagcttctggcgtgcccgatagattttctggcagcggcagcgacaaggacttcaccctgaagatctccagagtggaaaccgaggacgtgggcacctactactgtatgcagggcagagagagcccctggacatttggccagggcaccaaggtggacatcaaaggcggcggaggaagcggaggcggaggttctggtggtggtggctctggtggcggaggctcaggcggtggcggatctcaagttcatctgacacagagcggccctgaagtgcggaagcctggcacaagcgtgaaggtgtcctgtaaagcccctggcaacaccctgaaaacctacgacctgcactgggtccgatctgtgcctggacagggactgcaatggatgggctggattagccacgagggcgacaagaaagtgatcgtggaacggttcaaggccaaagtgaccatcgactgggacagaagcaccaacaccgcctacctgcagctgagcggactgacatctggcgataccgccgtgtactactgtgccaagggcagcaagcaccggctgagagattacgccctgtacgacgatgacggcgccctgaattgggccgtcgatgtggactacctgagcaacctggaattctggggccagggaacagccgtgacagtgtcttccggcggaggtggaagtggtggcggcggatctggcggcggtgggtccggaggtggtggatctgaacctaagagcagcgacaagacccacacctgtcctccatgtcctgctccagaactgctgggcggaccttccgtgttcctgtttcctccaaagcctaaggacaccctgatgatcagcagaacccctgaagtgacctgcgtggtggtggatgtgtctcacgaggaccctgaagtgaagttcaattggtacgtggacggcgtggaagtgcacaacgccaagaccaagcctagagaggaacagtacaacagcacctacagagtggtgtccgtgctgaccgtgctgcaccaggattggctgaacggcaaagagtacaagtgcaaggtgtccaacaaggccctgcctgcccctgaggaaaagaccatcagcaaggccaagggccagcctagggaaccccaggtttacaccctgcctccatgccgcgacgaactgaccaagaaccaggtgtccctgtggtgcctggtcaagggcttctacccttccgatatcgccgtggaatgggagagcaatggccagcctgagaacaactacaagacaacccctcctgtgctggacagcgacggctcattcttcctgtacagcaagctgacagtggacaagagcagatggcagcagggcaacgtgttcagctgcagcgtgctgcatgaagccctgcacagccactacacccagaagtccctgtctctgagccccggcaagtgataaggatccgatctggtactgcatgcacgcaatgctagctgcccctttcccgtcctgggtaccccgagtctcccccgacctcgggtcccaggtatgctcccacctccacctgccccactcaccacctctgctagttccagacacctcccaagcacgcagcaatgcagctcaaaacgcttagcctagccacacccccacgggaaacagcagtgattaacctttagcaataaacgaaagtttaactaagctatactaaccccagggttggtcaatttcgtgccagccacaccctcgagctagcaaaaaaaaaaaaaaaaaaaaaaaaaaaaaagcatatgactaaaaaaaaaaaaaaaaaaaaaaaaaaaaaaaaaaaaaaaaaaaaaaaaaaaaaaaaaaaaaaaaaaaaaa

SEQ ID NO: 1191 - DNA, 996 bp, synthetic construct
  source 1..996: mol_type = other DNA
gcctctacaaagggccctagcgtgttccctctggctcctagcagcaagtcgacatctggcggaacagccgctctgggctgtctggtcaaggactactttcccgagcctgtgacagtgtcctggaactctggcgctctgacaagcggcgtgcacacatttccagccgtgctgcaaagcagcggcctgtactctctgagcagcgtggtcacagtgccaagctctagcctgggcacccagacctacatctgcaatgtgaaccacaagcctagcaacaccaaggtggacaagcgcgtggaacccaagagctgcgacaagacccacacctgtcctccatgtcctgctccagaactgctcggcggaccttccgtgttcctgtttcctccaaagcctaaggacaccctgatgatcagcagaacccctgaagtgacctgcgtggtggtggatgtgtctcacgaggaccccgaagtgaagttcaattggtacgtggacggcgtggaagtgcacaacgccaagaccaagcctagagaggaacagtacaacagcacctacagagtggtgtccgtgctgacagtgctgcaccaggattggctgaacggcaaagagtacaagtgcaaggtgtccaacaaggccctgcctgctcctatcgagaaaaccatcagcaaggccaagggccagcctagggaaccccaggtttacacactgcctccaagccgcgaggaaatgaccaagaaccaggtgtccctgacctgcctcgtgaagggcttctacccttccgatatcgccgtggaatgggagagcaatggccagcctgagaacaactacaagacaacccctcctgtgctggacagcgacggctcattcttcctgtacagcaagctgactgtggataagtcccggtggcagcagggcaacgtgttcagctgttctgtgatgcacgaagccctgcacaaccactacacccagaaaagcctgtctctgagccccggcaagtgataa

SEQ ID NO: 1192 - DNA, 996 bp, synthetic construct
  source 1..996: mol_type = other DNA
gcctccacaaagggccctagcgtgttccctctggctcctagcagcaagtctacaagcggaggaacagctgccctgggctgcctggtcaaggattactttcctgagcctgtgaccgtgtcttggaactctggcgctctgacaagcggcgtgcacacatttccagccgtgctgcaaagcagcggcctgtactctctgagcagcgtggtcacagtgccaagctctagcctgggcacccagacctacatctgcaatgtgaaccacaagcctagcaacaccaaggtggacaagagagtggaacccaagagctgcgacaagacccacacctgtcctccatgtcctgctccagaactgctcggcggaccttccgtgttcctgtttcctccaaagcctaaggacaccctgatgatcagcagaacccctgaagtgacctgcgtggtggtggatgtgtctcacgaggacccagaagtgaagttcaattggtacgtggacggcgtggaagtgcacaacgccaagaccaagcctagagaggaacagtacaacagcacctacagagtggtgtccgtgctgacagtgctgcaccaggattggctgaacggcaaagagtacaagtgcaaggtgtccaacaaggccctgcctgctcctatcgagaaaaccatcagcaaggccaagggccagcctagggaaccccaggtttacacactgcctccaagccgcgaggaaatgaccaagaaccaggtgtccctgacctgcctcgtgaagggcttctacccttccgatatcgccgtggaatgggagagcaatggccagcctgagaacaactacaagacaacccctcctgtgctggacagcgacggctcattcttcctgtacagcaagctgaccgtggacaagtccagatggcagcagggcaacgtgttcagctgtagcgtgctgcacgaagccctgcacagccactacacccagaaaagcctgtctctgagccccggcaaatgataa

SEQ ID NO: 1193 - DNA, 996 bp, synthetic construct
  source 1..996: mol_type = other DNA
gcctctacaaagggccccagcgtgttcccactggctcctagcagcaagtctacaagcggaggaacagctgccctgggctgcctggtcaaggattactttcctgagcctgtgaccgtgtcttggaactctggcgctctgacaagcggcgtgcacacatttccagccgtgctgcaaagcagcggcctgtactctctgagcagcgtggtcacagtgccaagctctagcctgggcacccagacctacatctgcaatgtgaaccacaagcctagcaacaccaaggtggacaagagagtggaacccaagagctgcgacaagacccacacctgtcctccatgtcctgctccagaactgctcggcggaccttccgtgttcctgtttcctccaaagcctaaggacaccctgatgatcagcagaacccctgaagtgacctgcgtggtggtggatgtgtctcacgaggacccagaagtgaagttcaattggtacgtggacggcgtggaagtgcacaacgccaagaccaagcctagagaggaacagtacaacagcacctacagagtggtgtccgtgctgacagtgctgcaccaggattggctgaacggcaaagagtacaagtgcaaggtgtccaacaaggccctgcctgctcctatcgagaaaaccatcagcaaggccaagggccagcctagggaaccccaggtttacaccctgcctccatgccgcgaggaaatgaccaagaaccaggtgtccctgtggtgcctcgtgaagggcttctacccttccgatatcgccgtggaatgggagagcaatggccagcctgagaacaactacaagacaacccctcctgtgctggacagcgacggctcattcttcctgtacagcaagctgaccgtggacaagtccagatggcagcagggcaacgtgttcagctgtagcgtgctgcacgaagccctgcacagccactacacccagaaaagcctgtctctgagccccggcaagtgataa

SEQ ID NO: 1194 - DNA, 996 bp, synthetic construct
  source 1..996: mol_type = other DNA
gcctccacaaagggccctagcgtgttcccactggctcctagcagcaagtctacaagcggaggaacagccgctctgggctgcctggtcaaggattactttcccgagcctgtgaccgtgtcctggaattctggcgctctgacaagcggcgtgcacacctttccagctgtgctgcaaagcagcggcctgtactctctgagcagcgtggtcacagtgccaagctctagcctgggcacccagacctacatctgcaatgtgaaccacaagcctagcaacaccaaggtggacaagagagtggaacccaagagctgcgacaagacccacacctgtcctccatgtcctgctccagaactgctggccggaccttccgtgttcctgtttcctccaaagcctaaggacaccctgatgatcagcagaacccctgaagtgacctgcgtggtggtggatgtgtctcacgaggaccctgaagtgaagttcaattggtacgtggacggcgtggaagtgcacaacgccaagaccaagcctagagaggaacagtacaacagcacctacagagtggtgtccgtgctgaccgtgctgcaccaggattggctgaacggcaaagagtacaagtgcaaggtgtccaacaaggccctgcctctgcctgaggaaaagaccatcagcaaggccaagggccagcctagggaaccccaggtttacacactgcctccaagccgcgaggaaatgaccaagaaccaggtgtccctgacctgcctcgtgaagggcttctacccttccgatatcgccgtggaatgggagagcaatggccagcctgagaacaactacaagacaacccctcctgtgctggacagcgacggctcattcttcctgtacagcaagctgaccgtggacaagtccagatggcagcagggcaacgtgttcagctgtagcgtgctgcacgaagccctgcacagccactacacccagaaaagcctgtctctgagccccggcaaatgataa

SEQ ID NO: 1195 - DNA, 399 bp, synthetic construct
  source 1..399: mol_type = other DNA
ctggtactgcatgcacgcaatgctagctgcccctttcccgtcctgggtaccccgagtctcccccgacctcgggtcccaggtatgctcccacctccacctgccccactcaccacctctgctagttccagacacctcccaagcacgcagcaatgcagctcaaaacgcttagcctagccacacccccacgggaaacagcagtgattaacctttagcaataaacgaaagtttaactaagctatactaaccccagggttggtcaatttcgtgccagccacaccctcgagctagcaaaaaaaaaaaaaaaaaaaaaaaaaaaaaagcatatgactaaaaaaaaaaaaaaaaaaaaaaaaaaaaaaaaaaaaaaaaaaaaaaaaaaaaaaaaaaaaaaaaaaaaaa

SEQ ID NO: 1196 - DNA, 702 bp, synthetic construct
  source 1..702: mol_type = other DNA
gaacctaagagcagcgacaagacccacacctgtcctccatgtcctgctccagaactgctcggcggaccttccgtgttcctgtttcctccaaagcctaaggacaccctgatgatcagcagaacccctgaagtgacctgcgtggtggtggatgtgtctcacgaggaccccgaagtgaagttcaattggtacgtggacggcgtggaagtgcacaacgccaagaccaagcctagagaggaacagtacaacagcacctacagagtggtgtccgtgctgacagtgctgcaccaggattggctgaacggcaaagagtacaagtgcaaggtgtccaacaaggccctgcctgctcctatcgagaaaaccatcagcaaggccaagggccagcctagggaaccccaggtttacacactgcctccaagccgcgaggaaatgaccaagaaccaggtgtccctgacctgcctcgtgaagggcttctacccttccgatatcgccgtggaatgggagagcaatggccagcctgagaacaactacaagacaacccctcctgtgctggacagcgacggctcattcttcctgtacagcaagctgaccgtggacaagtccagatggcagcagggcaacgtgttcagctgtagcgtgctgcacgaagccctgcacagccactacacccagaaaagcctgtctctgagccccggcaaatgataa

SEQ ID NO: 1197 - DNA, 687 bp, synthetic construct
  source 1..687: mol_type = other DNA
gataagacccacacctgtcctccatgtccagctccagaactgctcggcggaccttccgtgttcctgtttcctccaaagcctaaggacaccctgatgatcagcagaacccctgaagtgacctgcgtggtggtggatgtgtctcacgaggaccccgaagtgaagttcaattggtacgtggacggcgtggaagtgcacaacgccaagaccaagcctagagaggaacagtacaacagcacctacagagtggtgtccgtgctgacagtgctgcaccaggattggctgaacggcaaagagtacaagtgcaaggtgtccaacaaggccctgcctgctcctatcgagaaaaccatcagcaaggccaagggccagcctagggaaccccaggtttacacactgcctccaagccgcgaggaaatgaccaagaaccaggtgtccctgacctgcctcgtgaagggcttctacccttccgatatcgccgtggaatgggagagcaatggccagcctgagaacaactacaagacaacccctcctgtgctggacagcgacggctcattcttcctgtacagcaagctgaccgtggacaagtccagatggcagcagggcaacgtgttcagctgtagcgtgctgcacgaagccctgcacagccactacacccagaaaagcctgtctctgagccccggcaaatgataa

SEQ ID NO: 1198 - DNA, 687 bp, synthetic construct
  source 1..687: mol_type = other DNA
gataagacccacacctgtcctccatgtccagctccagaactgctcggcggaccttccgtgttcctgtttcctccaaagcctaaggacaccctgatgatcagcagaacccctgaagtgacctgcgtggtggtggatgtgtctcacgaggaccccgaagtgaagttcaattggtacgtggacggcgtggaagtgcacaacgccaagaccaagcctagagaggaacagtacaacagcacctacagagtggtgtccgtgctgacagtgctgcaccaggattggctgaacggcaaagagtacaagtgcaaggtgtccaacaaggccctgcctgctcctatcgagaaaaccatcagcaaggccaagggccagcctagggaaccccaagtctgtacactgcctcctagccgcgaggaaatgaccaagaaccaggtgtccctgagctgcgccgtgaagggcttttacccttccgatatcgccgtggaatgggagagcaatggccagcctgagaacaactacaagacaacccctcctgtgctggacagcgacggctcattcttcctggtgtccaagctgacagtggacaagagcagatggcagcagggcaacgtgttcagctgctctgtgctgcacgaagccctgcacagccactacacccagaagtccctgtctctgagccccggcaagtgataa

SEQ ID NO: 1199 - DNA, 687 bp, synthetic construct
  source 1..687: mol_type = other DNA
gataagacccacacctgtcctccatgtccagctccagaactgctcggcggaccttccgtgttcctgtttcctccaaagcctaaggacaccctgatgatcagcagaacccctgaagtgacctgcgtggtggtggatgtgtctcacgaggaccccgaagtgaagttcaattggtacgtggacggcgtggaagtgcacaacgccaagaccaagcctagagaggaacagtacaacagcacctacagagtggtgtccgtgctgacagtgctgcaccaggattggctgaacggcaaagagtacaagtgcaaggtgtccaacaaggccctgcctgctcctatcgagaaaaccatcagcaaggccaagggccagcctagggaaccccaggtttacaccctgcctccatgccgcgaggaaatgaccaagaaccaggtgtccctgtggtgcctcgtgaagggcttctacccttccgatatcgccgtggaatgggagagcaatggccagcctgagaacaactacaagacaacccctcctgtgctggacagcgacggctcattcttcctgtacagcaagctgaccgtggacaagtccagatggcagcagggcaacgtgttcagctgtagcgtgctgcacgaagccctgcacagccactacacccagaagtccctgtctctgagccccggcaagtgataa

SEQ ID NO: 1200 - DNA, 687 bp, synthetic construct
  source 1..687: mol_type = other DNA
gataagacccacacctgtcctccatgtccagctccagaactgctggccggaccttccgtgttcctgtttcctccaaagcctaaggacaccctgatgatcagcagaacccctgaagtgacctgcgtggtggtggatgtgtctcacgaggaccccgaagtgaagttcaattggtacgtggacggcgtggaagtgcacaatgccaagaccaagcctagagaggaacagtacaacagcacctacagagtggtgtccgtgctgaccgtgctgcaccaggattggctgaacggcaaagagtacaagtgcaaggtgtccaacaaggccctgcctctgcctgaggaaaagaccatcagcaaggccaagggccagcctagggaaccccaggtttacacactgcctccaagccgcgaggaaatgaccaagaaccaggtgtccctgacctgcctcgtgaagggcttctacccttccgatatcgccgtggaatgggagagcaatggccagcctgagaacaactacaagacaacccctcctgtgctggacagcgacggctcattcttcctgtacagcaagctgaccgtggacaagtccagatggcagcagggcaacgtgttcagctgtagcgtgctgcacgaagccctgcacagccactacacccagaaaagcctgtctctgagccccggcaaatgataa

SEQ ID NO: 1201 - DNA, 687 bp, synthetic construct; identical to SEQ ID NO: 1198
  source 1..687: mol_type = other DNA

SEQ ID NO: 1202 - DNA, 321 bp, synthetic construct; identical to SEQ ID NO: 92
  source 1..321: mol_type = other DNA

SEQ ID NO: 1203 - DNA, 294 bp, synthetic construct; identical to SEQ ID NO: 86
  source 1..294: mol_type = other DNA

SEQ ID NO: 1204 - DNA, 702 bp, synthetic construct
  source 1..702: mol_type = other DNA
gaacccaagagctgcgacaagacccacacctgtcctccatgtcctgctccagaactgctcggcggaccttccgtgttcctgtttcctccaaagcctaaggacaccctgatgatcagcagaacccctgaagtgacctgcgtggtggtggatgtgtctcacgaggaccccgaagtgaagttcaattggtacgtggacggcgtggaagtgcacaacgccaagaccaagcctagagaggaacagtacaacagcacctacagagtggtgtccgtgctgacagtgctgcaccaggattggctgaacggcaaagagtacaagtgcaaggtgtccaacaaggccctgcctgctcctatcgagaaaaccatcagcaaggccaagggccagcctagggaaccccaggtttacacactgcctccaagccgcgaggaaatgaccaagaaccaggtgtccctgacctgcctcgtgaagggcttctacccttccgatatcgccgtggaatgggagagcaatggccagcctgagaacaactacaagacaacccctcctgtgctggacagcgacggctcattcttcctgtacagcaagctgaccgtggacaagtccagatggcagcagggcaacgtgttcagctgtagcgtgctgcacgaagccctgcacagccactacacccagaaaagcctgtctctgagccccggcaaatgataa

SEQ ID NO: 1205 - DNA, 996 bp, synthetic construct
  source 1..996: mol_type = other DNA
gcctctacaaagggccctagcgtgttccctctggctcctagcagcaagtcgacatctggcggaacagccgctctgggctgtctggtcaaggactactttcccgagcctgtgacagtgtcctggaactctggcgctctgacaagcggcgtgcacacatttccagccgtgctgcaaagcagcggcctgtactctctgagcagcgtggtcacagtgccaagctctagcctgggcacccagacctacatctgcaatgtgaaccacaagcctagcaacaccaaggtggacaagagagtggaacccaagagctgcgacaagacccacacctgtcctccatgtcctgctccagaactgctggccggaccttccgtgttcctgtttcctccaaagcctaaggacaccctgatgatcagcagaacccctgaagtgacctgcgtggtggtggatgtgtctcacgaggaccctgaagtgaagttcaattggtacgtggacggcgtggaagtgcacaacgccaagaccaagcctagagaggaacagtacaacagcacctacagagtggtgtccgtgctgaccgtgctgcaccaggattggctgaacggcaaagagtacaagtgcaaggtgtccaacaaggccctgcctgcccctgaggaaaagaccatcagcaaggccaagggccagcctagggaaccccaggtttacacactgcctccaagccgcgaggaaatgaccaagaaccaggtgtccctgacctgcctcgtgaagggcttctacccttccgatatcgccgtggaatgggagagcaatggccagcctgagaacaactacaagacaacccctcctgtgctggacagcgacggctcattcttcctgtacagcaagctgaccgtggacaagtccagatggcagcagggcaacgtgttcagctgtagcgtgctgcacgaagccctgcacagccactacacccagaaaagcctgtctctgagccccggcaaatgataa

SEQ ID NO: 1206 - DNA, 996 bp, synthetic construct
  source 1..996: mol_type = other DNA
gcctctacaaagggccctagcgtgttccctctggctcctagcagcaagtcgacatctggcggaacagccgctctgggctgtctggtcaaggactactttcccgagcctgtgacagtgtcctggaactctggcgctctgacaagcggcgtgcacacatttccagccgtgctgcaaagcagcggcctgtactctctgagcagcgtggtcacagtgccaagctctagcctgggcacccagacctacatctgcaatgtgaaccacaagcctagcaacaccaaggtggacaagaaggtggaacccaagagctgcgacaagacccacacctgtcctccatgtcctgctccagaactgctcggcggaccttccgtgttcctgtttcctccaaagcctaaggacaccctgatgatcagcagaacccctgaagtgacctgcgtggtggtggatgtgtctcacgaggacccagaagtgaagttcaattggtacgtggacggcgtggaagtgcacaacgccaagaccaagcctagagaggaacagtacaacagcacctacagagtggtgtccgtgctgacagtgctgcaccaggattggctgaacggcaaagagtacaagtgcaaggtgtccaacaaggccctgcctgctcctatcgagaaaaccatcagcaaggccaagggccagcctagggaaccccaggtttacacactgcctccaagccgcgaggaaatgaccaagaaccaggtgtccctgacctgcctcgtgaagggcttctacccttccgatatcgccgtggaatgggagagcaatggccagcctgagaacaactacaagacaacccctcctgtgctggacagcgacggctcattcttcctgtacagcaagctgactgtggataagtcccggtggcagcagggcaacgtgttcagctgttctgtgatgcacgaagccctgcacaaccactacacccagaaaagcctgtctctgagccccggcaagtgataa

SEQ ID NO: 1207 - DNA, 996 bp, synthetic construct
  source 1..996: mol_type = other DNA
gcctctacaaagggccctagcgtgttccctctggctcctagcagcaagtcgacatctggcggaacagccgctctgggctgtctggtcaaggactactttcccgagcctgtgacagtgtcctggaactctggcgctctgacaagcggcgtgcacacatttccagccgtgctgcaaagcagcggcctgtactctctgagcagcgtggtcacagtgccaagctctagcctgggcacccagacctacatctgcaatgtgaaccacaagcctagcaacaccaaggtggacaagaaggtggaacccaagagctgcgacaagacccacacctgtcctccatgtcctgctccagaactgctcggcggaccttccgtgttcctgtttcctccaaagcctaaggacaccctgatgatcagcagaacccctgaagtgacctgcgtggtggtggatgtgtctcacgaggacccagaagtgaagttcaattggtacgtggacggcgtggaagtgcacaacgccaagaccaagcctagagaggaacagtacaacagcacctacagagtggtgtccgtgctgacagtgctgcaccaggattggctgaacggcaaagagtacaagtgcaaggtgtccaacaaggccctgcctgctcctatcgagaaaaccatcagcaaggccaagggccagcctagggaaccccaggtttacacactgcctccaagccgcgaggaaatgaccaagaaccaggtgtccctgacctgcctcgtgaagggcttctacccttccgatatcgccgtggaatgggagagcaatggccagcctgagaacaactacaagacaacccctcctgtgctggacagcgacggctcattcttcctgtacagcaagctgaccgtggacaagtccagatggcagcagggcaacgtgttcagctgtagcgtgctgcacgaagccctgcacagccactacacccagaaaagcctgtctctgagccccggcaaatgataa

SEQ ID NO: 1208 - DNA, 996 bp, synthetic construct
  source 1..996: mol_type = other DNA
gcctctacaaagggccctagcgtgttccctctggctcctagcagcaagtcgacatctggcggaacagccgctctgggctgtctggtcaaggactactttcccgagcctgtgacagtgtcctggaactctggcgctctgacaagcggcgtgcacacatttccagccgtgctgcaaagcagcggcctgtactctctgagcagcgtggtcacagtgccaagctctagcctgggcacccagacctacatctgcaatgtgaaccacaagcctagcaacaccaaggtggacaagaaggtggaacccaagagctgcgacaagacccacacctgtcctccatgtcctgctccagaactgctcggcggaccttccgtgttcctgtttcctccaaagcctaaggacaccctgatgatcagcagaacccctgaagtgacctgcgtggtggtggatgtgtctcacgaggacccagaagtgaagttcaattggtacgtggacggcgtggaagtgcacaacgccaagaccaagcctagagaggaacagtacaacagcacctacagagtggtgtccgtgctgacagtgctgcaccaggattggctgaacggcaaagagtacaagtgcaaggtgtccaacaaggccctgcctgctcctatcgagaaaaccatcagcaaggccaagggccagcctagggaaccccaggtttacaccctgcctccatgccgcgaggaaatgaccaagaaccaggtgtccctgtggtgcctggtcaagggcttctacccttccgatatcgccgtggaatgggagagcaatggccagcctgagaacaactacaagacaacccctcctgtgctggacagcgacggctcattcttcctgtacagcaagctgacagtggacaagagcagatggcagcagggcaacgtgttcagctgcagcgtgctgcatgaagccctgcacagccactacacccagaagtccctgtctctgagccccggcaagtgataa

SEQ ID NO: 1209 - DNA, 996 bp, synthetic construct
  source 1..996: mol_type = other DNA
gcctctacaaagggccctagcgtgttccctctggctcctagcagcaagtcgacatctggcggaacagccgctctgggctgtctggtcaaggactactttcccgagcctgtgacagtgtcctggaactctggcgctctgacaagcggcgtgcacacatttccagccgtgctgcaaagcagcggcctgtactctctgagcagcgtggtcacagtgccaagctctagcctgggcacccagacctacatctgcaatgtgaaccacaagcctagcaacaccaaggtggacaagaaggtggaacccaagagctgcgacaagacccacacctgtcctccatgtcctgctccagaactgctggccggaccttccgtgttcctgtttcctccaaagcctaaggacaccctgatgatcagcagaacccctgaagtgacctgcgtggtggtggatgtgtctcacgaggaccctgaagtgaagttcaattggtacgtggacggcgtggaagtgcacaacgccaagaccaagcctagagaggaacagtacaacagcacctacagagtggtgtccgtgctgaccgtgctgcaccaggattggctgaacggcaaagagtacaagtgcaaggtgtccaacaaggccctgcctctgcctgaggaaaagaccatcagcaaggccaagggccagcctagggaaccccaggtttacacactgcctccaagccgcgaggaaatgaccaagaaccaggtgtccctgacctgcctcgtgaagggcttctacccttccgatatcgccgtggaatgggagagcaatggccagcctgagaacaactacaagacaacccctcctgtgctggacagcgacggctcattcttcctgtacagcaagctgaccgtggacaagtccagatggcagcagggcaacgtgttcagctgtagcgtgctgcacgaagccctgcacagccactacacccagaaaagcctgtctctgagccccggcaaatgataa

SEQ ID NO: 1210 - DNA, 996 bp, synthetic construct
  source 1..996: mol_type = other DNA
gcctctacaaagggccctagcgtgttccctctggctcctagcagcaagtcgacatctggcggaacagccgctctgggctgtctggtcaaggactactttcccgagcctgtgacagtgtcctggaactctggcgctctgacaagcggcgtgcacacatttccagccgtgctgcaaagcagcggcctgtactctctgagcagcgtggtcacagtgccaagctctagcctgggcacccagacctacatctgcaatgtgaaccacaagcctagcaacaccaaggtggacaagaaggtggaacccaagagctgcgacaagacccacacctgtcctccatgtcctgctccagaactgctggccggaccttccgtgttcctgtttcctccaaagcctaaggacaccctgatgatcagcagaacccctgaagtgacctgcgtggtggtggatgtgtctcacgaggaccctgaagtgaagttcaattggtacgtggacggcgtggaagtgcacaacgccaagaccaagcctagagaggaacagtacaacagcacctacagagtggtgtccgtgctgaccgtgctgcaccaggattggctgaacggcaaagagtacaagtgcaaggtgtccaacaaggccctgcctgcccctgaggaaaagaccatcagcaaggccaagggccagcctagggaaccccaggtttacacactgcctccaagccgcgaggaaatgaccaagaaccaggtgtccctgacctgcctcgtgaagggcttctacccttccgatatcgccgtggaatgggagagcaatggccagcctgagaacaactacaagacaacccctcctgtgctggacagcgacggctcattcttcctgtacagcaagctgaccgtggacaagtccagatggcagcagggcaacgtgttcagctgtagcgtgctgcacgaagccctgcacagccactacacccagaaaagcctgtctctgagccccggcaaatgataa

SEQ ID NO: 1211 - DNA, 996 bp, synthetic construct
  source 1..996: mol_type = other DNA
gcctctacaaagggccctagcgtgttccctctggctcctagcagcaagtcgacatctggcggaacagccgctctgggctgtctggtcaaggactactttcccgagcctgtgacagtgtcctggaactctggcgctctgacaagcggcgtgcacacatttccagccgtgctgcaaagcagcggcctgtactctctgagcagcgtggtcacagtgccaagctctagcctgggcacccagacctacatctgcaatgtgaaccacaagcctagcaacaccaaggtggacaagaaggtggaacccaagagctgcgacaagacccacacctgtcctccatgtcctgctccagaactgctcggcggaccttccgtgttcctgtttcctccaaagcctaaggacaccctgatgatcagcagaacccctgaagtgacctgcgtggtggtggatgtgtctcacgaggacccagaagtgaagttcaattggtacgtggacggcgtggaagtgcacaacgccaagaccaagcctagagaggaacagtacaacagcacctacagagtggtgtccgtgctgacagtgctgcaccaggattggctgaacggcaaagagtacaagtgcaaggtgtccaacaaggccctgcctgctcctatcgagaaaaccatcagcaaggccaagggccagcctagggaaccccaggtttacacactgcctccaagccgcgacgaactgaccaagaaccaggtgtccctgacctgcctcgtgaagggcttctacccttccgatatcgccgtggaatgggagagcaatggccagcctgagaacaactacaagacaacccctcctgtgctggacagcgacggctcattcttcctgtacagcaagctgactgtggataagtcccggtggcagcagggcaacgtgttcagctgttctgtgatgcacgaagccctgcacaaccactacacccagaaaagcctgtctctgagccccggcaagtgataa

SEQ ID NO: 1212 - DNA, 996 bp, synthetic construct
  source 1..996: mol_type = other DNA
gcctctacaaagggccctagcgtgttccctctggctcctagcagcaagtcgacatctggcggaacagccgctctgggctgtctggtcaaggactactttcccgagcctgtgacagtgtcctggaactctggcgctctgacaagcggcgtgcacacatttccagccgtgctgcaaagcagcggcctgtactctctgagcagcgtggtcacagtgccaagctctagcctgggcacccagacctacatctgcaatgtgaaccacaagcctagcaacaccaaggtggacaagaaggtggaacccaagagctgcgacaagacccacacctgtcctccatgtcctgctccagaactgctcggcggaccttccgtgttcctgtttcctccaaagcctaaggacaccctgatgatcagcagaacccctgaagtgacctgcgtggtggtggatgtgtctcacgaggacccagaagtgaagttcaattggtacgtggacggcgtggaagtgcacaacgccaagaccaagcctagagaggaacagtacaacagcacctacagagtggtgtccgtgctgacagtgctgcaccaggattggctgaacggcaaagagtacaagtgcaaggtgtccaacaaggccctgcctgctcctatcgagaaaaccatcagcaaggccaagggccagcctagggaaccccaggtttacacactgcctccaagccgcgacgaactgaccaagaaccaggtgtccctgacctgcctcgtgaagggcttctacccttccgatatcgccgtggaatgggagagcaatggccagcctgagaacaactacaagacaacccctcctgtgctggacagcgacggctcattcttcctgtacagcaagctgaccgtggacaagtccagatggcagcagggcaacgtgttcagctgtagcgtgctgcacgaagccctgcacagccactacacccagaaaagcctgtctctgagccccggcaaatgataa

SEQ ID NO: 1213 - DNA, 996 bp, synthetic construct
  source 1..996: mol_type = other DNA
gcctctacaaagggccctagcgtgttccctctggctcctagcagcaagtcgacatctggcggaacagccgctctgggctgtctggtcaaggactactttcccgagcctgtgacagtgtcctggaactctggcgctctgacaagcggcgtgcacacatttccagccgtgctgcaaagcagcggcctgtactctctgagcagcgtggtcacagtgccaagctctagcctgggcacccagacctacatctgcaatgtgaaccacaagcctagcaacaccaaggtggacaagaaggtggaacccaagagctgcgacaagacccacacctgtcctccatgtcctgctccagaactgctcggcggaccttccgtgttcctgtttcctccaaagcctaaggacaccctgatgatcagcagaacccctgaagtgacctgcgtggtggtggatgtgtctcacgaggacccagaagtgaagttcaattggtacgtggacggcgtggaagtgcacaacgccaagaccaagcctagagaggaacagtacaacagcacctacagagtggtgtccgtgctgacagtgctgcaccaggattggctgaacggcaaagagtacaagtgcaaggtgtccaacaaggccctgcctgctcctatcgagaaaaccatcagcaaggccaagggccagcctagggaaccccaggtttacaccctgcctccatgccgcgacgaactgaccaagaaccaggtgtccctgtggtgcctggtcaagggcttctacccttccgatatcgccgtggaatgggagagcaatggccagcctgagaacaactacaagacaacccctcctgtgctggacagcgacggctcattcttcctgtacagcaagctgacagtggacaagagcagatggcagcagggcaacgtgttcagctgcagcgtgctgcatgaagccctgcacagccactacacccagaagtccctgtctctgagccccggcaagtgataa

SEQ ID NO: 1214 - DNA, 996 bp, synthetic construct
  source 1..996: mol_type = other DNA
gcctctacaaagggccctagcgtgttccctctggctcctagcagcaagtcgacatctggcggaacagccgctctgggctgtctggtcaaggactactttcccgagcctgtgacagtgtcctggaactctggcgctctgacaagcggcgtgcacacatttccagccgtgctgcaaagcagcggcctgtactctctgagcagcgtggtcacagtgccaagctctagcctgggcacccagacctacatctgcaatgtgaaccacaagcctagcaacaccaaggtggacaagaaggtggaacccaagagctgcgacaagacccacacctgtcctccatgtcctgctccagaactgctggccggaccttccgtgttcctgtttcctccaaagcctaaggacaccctgatgatcagcagaacccctgaagtgacctgcgtggtggtggatgtgtctcacgaggaccctgaagtgaagttcaattggtacgtggacggcgtggaagtgcacaacgccaagaccaagcctagagaggaacagtacaacagcacctacagagtggtgtccgtgctgaccgtgctgcaccaggattggctgaacggcaaagagtacaagtgcaaggtgtccaacaaggccctgcctctgcctgaggaaaagaccatcagcaaggccaagggccagcctagggaaccccaggtttacacactgcctccaagccgcgacgaactgaccaagaaccaggtgtccctgacctgcctcgtgaagggcttctacccttccgatatcgccgtggaatgggagagcaatggccagcctgagaacaactacaagacaacccctcctgtgctggacagcgacggctcattcttcctgtacagcaagctgaccgtggacaagtccagatggcagcagggcaacgtgttcagctgtagcgtgctgcacgaagccctgcacagccactacacccagaaaagcctgtctctgagccccggcaaatgataa

SEQ ID NO: 1215 - DNA, 996 bp, synthetic construct
  source 1..996: mol_type = other DNA
gcctctacaaagggccctagcgtgttccctctggctcctagcagcaagtcgacatctggcggaacagccgctctgggctgtctggtcaaggactactttcccgagcctgtgacagtgtcctggaactctggcgctctgacaagcggcgtgcacacatttccagccgtgctgcaaagcagcggcctgtactctctgagcagcgtggtcacagtgccaagctctagcctgggcacccagacctacatctgcaatgtgaaccacaagcctagcaacaccaaggtggacaagaaggtggaacccaagagctgcgacaagacccacacctgtcctccatgtcctgctccagaactgctggccggaccttccgtgttcctgtttcctccaaagcctaaggacaccctgatgatcagcagaacccctgaagtgacctgcgtggtggtggatgtgtctcacgaggaccctgaagtgaagttcaattggtacgtggacggcgtggaagtgcacaacgccaagaccaagcctagagaggaacagtacaacagcacctacagagtggtgtccgtgctgaccgtgctgcaccaggattggctgaacggcaaagagtacaagtgcaaggtgtccaacaaggccctgcctgcccctgaggaaaagaccatcagcaaggccaagggccagcctagggaaccccaggtttacacactgcctccaagccgcgacgaactgaccaagaaccaggtgtccctgacctgcctcgtgaagggcttctacccttccgatatcgccgtggaatgggagagcaatggccagcctgagaacaactacaagacaacccctcctgtgctggacagcgacggctcattcttcctgtacagcaagctgaccgtggacaagtccagatggcagcagggcaacgtgttcagctgtagcgtgctgcacgaagccctgcacagccactacacccagaaaagcctgtctctgagccccggcaaatgataa

SEQ ID NO: 1216 - DNA, 996 bp, synthetic construct
  source 1..996: mol_type = other DNA
gcctctacaaagggccctagcgtgttccctctggctcctagcagcaagtcgacatctggcggaacagccgctctgggctgtctggtcaaggactactttcccgagcctgtgacagtgtcctggaactctggcgctctgacaagcggcgtgcacacatttccagccgtgctgcaaagcagcggcctgtactctctgagcagcgtggtcacagtgccaagctctagcctgggcacccagacctacatctgcaatgtgaaccacaagcctagcaacaccaaggtggacaagagagtggaacccaagagctgcgacaagacccacacctgtcctccatgtcctgctccagaactgctggccggaccttccgtgttcctgtttcctccaaagcctaaggacaccctgatgatcagcagaacccctgaagtgacctgcgtggtggtggatgtgtctcacgaggaccctgaagtgaagttcaattggtacgtggacggcgtggaagtgcacaacgccaagaccaagcctagagaggaacagtacaacagcacctacagagtggtgtccgtgctgaccgtgctgcaccaggattggctgaacggcaaagagtacaagtgcaaggtgtccaacaaggccctgcctgcccctatcgaaaagaccatcagcaaggccaagggccagcctagggaaccccaggtttacacactgcctccaagccgcgaggaaatgaccaagaaccaggtgtccctgacctgcctcgtgaagggcttctacccttccgatatcgccgtggaatgggagagcaatggccagcctgagaacaactacaagacaacccctcctgtgctggacagcgacggctcattcttcctgtacagcaagctgaccgtggacaagtccagatggcagcagggcaacgtgttcagctgtagcgtgctgcacgaagccctgcacagccactacacccagaaaagcctgtctctgagccccggcaaatgataa

SEQ ID NO: 1217 - DNA, 996 bp, synthetic construct
  source 1..996: mol_type = other DNA
gcctctacaaagggccctagcgtgttccctctggctcctagcagcaagtcgacatctggcggaacagccgctctgggctgtctggtcaaggactactttcccgagcctgtgacagtgtcctggaactctggcgctctgacaagcggcgtgcacacatttccagccgtgctgcaaagcagcggcctgtactctctgagcagcgtggtcacagtgccaagctctagcctgggcacccagacctacatctgcaatgtgaaccacaagcctagcaacaccaaggtggacaagagagtggaacccaagagctgcgacaagacccacacctgtcctccatgtcctgctccagaactgctgggcggaccttccgtgttcctgtttcctccaaagcctaaggacaccctgatgatcagcagaacccctgaagtgacctgcgtggtggtggatgtgtctcacgaggaccctgaagtgaagttcaattggtacgtggacggcgtggaagtgcacaacgccaagaccaagcctagagaggaacagtacaacagcacctacagagtggtgtccgtgctgaccgtgctgcaccaggattggctgaacggcaaagagtacaagtgcaaggtgtccaacaaggccctgcctgcccctgaggaaaagaccatcagcaaggccaagggccagcctagggaaccccaggtttacacactgcctccaagccgcgaggaaatgaccaagaaccaggtgtccctgacctgcctcgtgaagggcttctacccttccgatatcgccgtggaatgggagagcaatggccagcctgagaacaactacaagacaacccctcctgtgctggacagcgacggctcattcttcctgtacagcaagctgaccgtggacaagtccagatggcagcagggcaacgtgttcagctgtagcgtgctgcacgaagccctgcacagccactacacccagaaaagcctgtctctgagccccggcaaatgataa

SEQ ID NO: 1218 - DNA, 996 bp, synthetic construct
  source 1..996: mol_type = other DNA
gcctctacaaagggccctagcgtgttccctctggctcctagcagcaagtcgacatctggcggaacagccgctctgggctgtctggtcaaggactactttcccgagcctgtgacagtgtcctggaactctggcgctctgacaagcggcgtgcacacatttccagccgtgctgcaaagcagcggcctgtactctctgagcagcgtggtcacagtgccaagctctagcctgggcacccagacctacatctgcaatgtgaaccacaagcctagcaacaccaaggtggacaagagagtggaacccaagagctgcgacaagacccacacctgtcctccatgtcctgctccagaactgctcggcggaccttccgtgttcctgtttcctccaaagcctaaggacaccctgatgatcagcagaacccctgaagtgacctgcgtggtggtggatgtgtctcacgaggacccagaagtgaagttcaattggtacgtggacggcgtggaagtgcacaacgccaagaccaagcctagagaggaacagtacaacagcacctacagagtggtgtccgtgctgacagtgctgcaccaggattggctgaacggcaaagagtacaagtgcaaggtgtccaacaaggccctgcctgctcctatcgagaaaaccatcagcaaggccaagggccagcctcgcgaacctcaagtctgtacactgcctcctagccgcgaggaaatgaccaagaaccaggtgtccctgagctgcgccgtgaagggcttttacccttccgatatcgccgtggaatgggagagcaatggccagcctgagaacaactacaagacaacccctcctgtgctggacagcgacggctcattcttcctggtgtccaagctgacagtggacaagagcagatggcagcagggcaacgtgttcagctgcagcgtgctgcatgaagccctgcacagccactacacccagaagtccctgtctctgagccccggcaagtgataa

SEQ ID NO: 1219 - DNA, 996 bp, synthetic construct
  source 1..996: mol_type = other DNA
gcctctacaaagggccctagcgtgttccctctggctcctagcagcaagtcgacatctggcggaacagccgctctgggctgtctggtcaaggactactttcccgagcctgtgacagtgtcctggaactctggcgctctgacaagcggcgtgcacacatttccagccgtgctgcaaagcagcggcctgtactctctgagcagcgtggtcacagtgccaagctctagcctgggcacccagacctacatctgcaatgtgaaccacaagcctagcaacaccaaggtggacaagagagtggaacccaagagctgcgacaagacccacacctgtcctccatgtcctgctccagaactgctggccggaccttccgtgttcctgtttcctccaaagcctaaggacaccctgatgatcagcagaacccctgaagtgacctgcgtggtggtggatgtgtctcacgaggaccctgaagtgaagttcaattggtacgtggacggcgtggaagtgcacaacgccaagaccaagcctagagaggaacagtacaacagcacctacagagtggtgtccgtgctgaccgtgctgcaccaggattggctgaacggcaaagagtacaagtgcaaggtgtccaacaaggccctgcctctgcctgaggaaaagaccatcagcaaggccaagggccagcctcgcgaacctcaagtctgtacactgcctcctagccgcgaggaaatgaccaagaaccaggtgtccctgagctgcgccgtgaagggcttttacccttccgatatcgccgtggaatgggagagcaatggccagcctgagaacaactacaagacaacccctcctgtgctggacagcgacggctcattcttcctggtgtccaagctgacagtggacaagagcagatggcagcagggcaacgtgttcagctgcagcgtgctgcatgaagccctgcacagccactacacccagaagtccctgtctctgagccccggcaagtgataa

SEQ ID NO: 1220 - DNA, 996 bp, synthetic construct
  source 1..996: mol_type = other DNA
gcctctacaaagggccctagcgtgttccctctggctcctagcagcaagtcgacatctggcggaacagccgctctgggctgtctggtcaaggactactttcccgagcctgtgacagtgtcctggaactctggcgctctgacaagcggcgtgcacacatttccagccgtgctgcaaagcagcggcctgtactctctgagcagcgtggtcacagtgccaagctctagcctgggcacccagacctacatctgcaatgtgaaccacaagcctagcaacaccaaggtggacaagagagtggaacccaagagctgcgacaagacccacacctgtcctccatgtcctgctccagaactgctggccggaccttccgtgttcctgtttcctccaaagcctaaggacaccctgatgatcagcagaacccctgaagtgacctgcgtggtggtggatgtgtctcacgaggaccctgaagtgaagttcaattggtacgtggacggcgtggaagtgcacaacgccaagaccaagcctagagaggaacagtacaacagcacctacagagtggtgtccgtgctgaccgtgctgcaccaggattggctgaacggcaaagagtacaagtgcaaggtgtccaacaaggccctgcctgcccctgaggaaaagaccatcagcaaggccaagggccagcctcgcgaacctcaagtctgtacactgcctcctagccgcgaggaaatgaccaagaaccaggtgtccctgagctgcgccgtgaagggcttttacccttccgatatcgccgtggaatgggagagcaatggccagcctgagaacaactacaagacaacccctcctgtgctggacagcgacggctcattcttcctggtgtccaagctgacagtggacaagagcagatggcagcagggcaacgtgttcagctgcagcgtgctgcatgaagccctgcacagccactacacccagaagtccctgtctctgagccccggcaagtgataa

SEQ ID NO: 1221 - DNA, 996 bp, synthetic construct
  source 1..996: mol_type = other DNA
gcctctacaaagggccctagcgtgttccctctggctcctagcagcaagtcgacatctggcggaacagccgctctgggctgtctggtcaaggactactttcccgagcctgtgacagtgtcctggaactctggcgctctgacaagcggcgtgcacacatttccagccgtgctgcaaagcagcggcctgtactctctgagcagcgtggtcacagtgccaagctctagcctgggcacccagacctacatctgcaatgtgaaccacaagcctagcaacaccaaggtggacaagagagtggaacccaagagctgcgacaagacccacacctgtcctccatgtcctgctccagaactgctggccggaccttccgtgttcctgtttcctccaaagcctaaggacaccctgatgatcagcagaacccctgaagtgacctgcgtggtggtggatgtgtctcacgaggaccctgaagtgaagttcaattggtacgtggacggcgtggaagtgcacaacgccaagaccaagcctagagaggaacagtacaacagcacctacagagtggtgtccgtgctgaccgtgctgcaccaggattggctgaacggcaaagagtacaagtgcaaggtgtccaacaaggccctgcctctgcctgaggaaaagaccatcagcaaggccaagggccagcctagggaaccccaggtttacaccctgcctccatgccgcgaggaaatgaccaagaaccaggtgtccctgtggtgcctggtcaagggcttctacccttccgatatcgccgtggaatgggagagcaatggccagcctgagaacaactacaagacaacccctcctgtgctggacagcgacggctcattcttcctgtacagcaagctgacagtggacaagagcagatggcagcagggcaacgtgttcagctgcagcgtgctgcatgaagccctgcacagccactacacccagaagtccctgtctctgagccccggcaagtgataa

SEQ ID NO: 1222 - DNA, 996 bp, synthetic construct
  source 1..996: mol_type = other DNA
gcctctacaaagggccctagcgtgttccctctggctcctagcagcaagtcgacatctggcggaacagccgctctgggctgtctggtcaaggactactttcccgagcctgtgacagtgtcctggaactctggcgctctgacaagcggcgtgcacacatttccagccgtgctgcaaagcagcggcctgtactctctgagcagcgtggtcacagtgccaagctctagcctgggcacccagacctacatctgcaatgtgaaccacaagcctagcaacaccaaggtggacaagagagtggaacccaagagctgcgacaagacccacacctgtcctccatgtcctgctccagaactgctggccggaccttccgtgttcctgtttcctccaaagcctaaggacaccctgatgatcagcagaacccctgaagtgacctgcgtggtggtggatgtgtctcacgaggaccctgaagtgaagttcaattggtacgtggacggcgtggaagtgcacaacgccaagaccaagcctagagaggaacagtacaacagcacctacagagtggtgtccgtgctgaccgtgctgcaccaggattggctgaacggcaaagagtacaagtgcaaggtgtccaacaaggccctgcctgcccctgaggaaaagaccatcagcaaggccaagggccagcctagggaaccccaggtttacaccctgcctccatgccgcgaggaaatgaccaagaaccaggtgtccctgtggtgcctggtcaagggcttctacccttccgatatcgccgtggaatgggagagcaatggccagcctgagaacaactacaagacaacccctcctgtgctggacagcgacggctcattcttcctgtacagcaagctgacagtggacaagagcagatggcagcagggcaacgtgttcagctgcagcgtgctgcatgaagccctgcacagccactacacccagaagtccctgtctctgagccccggcaagtgataa

SEQ ID NO: 1223 - DNA, 996 bp, synthetic construct
  source 1..996: mol_type = other DNA
gcctctacaaagggccctagcgtgttccctctggctcctagcagcaagtcgacatctggcggaacagccgctctgggctgtctggtcaaggactactttcccgagcctgtgacagtgtcctggaactctggcgctctgacaagcggcgtgcacacatttccagccgtgctgcaaagcagcggcctgtactctctgagcagcgtggtcacagtgccaagctctagcctgggcacccagacctacatctgcaatgtgaaccacaagcctagcaacaccaaggtggacaagaaggtggaacccaagagctgcgacaagacccacacctgtcctccatgtcctgctccagaactgctggccggaccttccgtgttcctgtttcctccaaagcctaaggacaccctgatgatcagcagaacccctgaagtgacctgcgtggtggtggatgtgtctcacgaggaccctgaagtgaagttcaattggtacgtggacggcgtggaagtgcacaacgccaagaccaagcctagagaggaacagtacaacagcacctacagagtggtgtccgtgctgaccgtgctgcaccaggattggctgaacggcaaagagtacaagtgcaaggtgtccaacaaggccctgcctgcccctatcgaaaagaccatcagcaaggccaagggccagcctagggaaccccaggtttacacactgcctccaagccgcgaggaaatgaccaagaaccaggtgtccctgacctgcctcgtgaagggcttctacccttccgatatcgccgtggaatgggagagcaatggccagcctgagaacaactacaagacaacccctcctgtgctggacagcgacggctcattcttcctgtacagcaagctgaccgtggacaagtccagatggcagcagggcaacgtgttcagctgtagcgtgctgcacgaagccctgcacagccactacacccagaaaagcctgtctctgagccccggcaaatgataa

SEQ ID NO: 1224 - DNA, 996 bp, synthetic construct
  source 1..996: mol_type = other DNA
gcctctacaaagggccctagcgtgttccctctggctcctagcagcaagtcgacatctggcggaacagccgctctgggctgtctggtcaaggactactttcccgagcctgtgacagtgtcctggaactctggcgctctgacaagcggcgtgcacacatttccagccgtgctgcaaagcagcggcctgtactctctgagcagcgtggtcacagtgccaagctctagcctgggcacccagacctacatctgcaatgtgaaccacaagcctagcaacaccaaggtggacaagaaggtggaacccaagagctgcgacaagacccacacctgtcctccatgtcctgctccagaactgctgggcggaccttccgtgttcctgtttcctccaaagcctaaggacaccctgatgatcagcagaacccctgaagtgacctgcgtggtggtggatgtgtctcacgaggaccctgaagtgaagttcaattggtacgtggacggcgtggaagtgcacaacgccaagaccaagcctagagaggaacagtacaacagcacctacagagtggtgtccgtgctgaccgtgctgcaccaggattggctgaacggcaaagagtacaagtgcaaggtgtccaacaaggccctgcctgcccctgaggaaaagaccatcagcaaggccaagggccagcctagggaaccccaggtttacacactgcctccaagccgcgaggaaatgaccaagaaccaggtgtccctgacctgcctcgtgaagggcttctacccttccgatatcgccgtggaatgggagagcaatggccagcctgagaacaactacaagacaacccctcctgtgctggacagcgacggctcattcttcctgtacagcaagctgaccgtggacaagtccagatggcagcagggcaacgtgttcagctgtagcgtgctgcacgaagccctgcacagccactacacccagaaaagcctgtctctgagccccggcaaatgataa

SEQ ID NO: 1225 - DNA, 996 bp, synthetic construct
  source 1..996: mol_type = other DNA
gcctctacaaagggccctagcgtgttccctctggctcctagcagcaagtcgacatctggcggaacagccgctctgggctgtctggtcaaggactactttcccgagcctgtgacagtgtcctggaactctggcgctctgacaagcggcgtgcacacatttccagccgtgctgcaaagcagcggcctgtactctctgagcagcgtggtcacagtgccaagctctagcctgggcacccagacctacatctgcaatgtgaaccacaagcctagcaacaccaaggtggacaagaaggtggaacccaagagctgcgacaagacccacacctgtcctccatgtcctgctccagaactgctcggcggaccttccgtgttcctgtttcctccaaagcctaaggacaccctgatgatcagcagaacccctgaagtgacctgcgtggtggtggatgtgtctcacgaggacccagaagtgaagttcaattggtacgtggacggcgtggaagtgcacaacgccaagaccaagcctagagaggaacagtacaacagcacctacagagtggtgtccgtgctgacagtgctgcaccaggattggctgaacggcaaagagtacaagtgcaaggtgtccaacaaggccctgcctgctcctatcgagaaaaccatcagcaaggccaagggccagcctcgcgaacctcaagtctgtacactgcctcctagccgcgaggaaatgaccaagaaccaggtgtccctgagctgcgccgtgaagggcttttacccttccgatatcgccgtggaatgggagagcaatggccagcctgagaacaactacaagacaacccctcctgtgctggacagcgacggctcattcttcctggtgtccaagctgacagtggacaagagcagatggcagcagggcaacgtgttcagctgcagcgtgctgcatgaagccctgcacagccactacacccagaagtccctgtctctgagccccggcaagtgataa

SEQ ID NO: 1226 - DNA, 996 bp, synthetic construct
  source 1..996: mol_type = other DNA
gcctctacaaagggccctagcgtgttccctctggctcctagcagcaagtcgacatctggcggaacagccgctctgggctgtctggtcaaggactactttcccgagcctgtgacagtgtcctggaactctggcgctctgacaagcggcgtgcacacatttccagccgtgctgcaaagcagcggcctgtactctctgagcagcgtggtcacagtgccaagctctagcctgggcacccagacctacatctgcaatgtgaaccacaagcctagcaacaccaaggtggacaagaaggtggaacccaagagctgcgacaagacccacacctgtcctccatgtcctgctccagaactgctggccggaccttccgtgttcctgtttcctccaaagcctaaggacaccctgatgatcagcagaacccctgaagtgacctgcgtggtggtggatgtgtctcacgaggaccctgaagtgaagttcaattggtacgtggacggcgtggaagtgcacaacgccaagaccaagcctagagaggaacagtacaacagcacctacagagtggtgtccgtgctgaccgtgctgcaccaggattggctgaacggcaaagagtacaagtgcaaggtgtccaacaaggccctgcctctgcctgaggaaaagaccatcagcaaggccaagggccagcctcgcgaacctcaagtctgtacactgcctcctagccgcgaggaaatgaccaagaaccaggtgtccctgagctgcgccgtgaagggcttttacccttccgatatcgccgtggaatgggagagcaatggccagcctgagaacaactacaagacaacccctcctgtgctggacagcgacggctcattcttcctggtgtccaagctgacagtggacaagagcagatggcagcagggcaacgtgttcagctgcagcgtgctgcatgaagccctgcacagccactacacccagaagtccctgtctctgagccccggcaagtgataa

SEQ ID NO: 1227 - DNA, 996 bp, synthetic construct
  source 1..996: mol_type = other DNA
gcctctacaaagggccctagcgtgttccctctggctcctagcagcaagtcgacatctggcggaacagccgctctgggctgtctggtcaaggactactttcccgagcctgtgacagtgtcctggaactctggcgctctgacaagcggcgtgcacacatttccagccgtgctgcaaagcagcggcctgtactctctgagcagcgtggtcacagtgccaagctctagcctgggcacccagacctacatctgcaatgtgaaccacaagcctagcaacaccaaggtggacaagaaggtggaacccaagagctgcgacaagacccacacctgtcctccatgtcctgctccagaactgctggccggaccttccgtgttcctgtttcctccaaagcctaaggacaccctgatgatcagcagaacccctgaagtgacctgcgtggtggtggatgtgtctcacgaggaccctgaagtgaagttcaattggtacgtggacggcgtggaagtgcacaacgccaagaccaagcctagagaggaacagtacaacagcacctacagagtggtgtccgtgctgaccgtgctgcaccaggattggctgaacggcaaagagtacaagtgcaaggtgtccaacaaggccctgcctgcccctgaggaaaagaccatcagcaaggccaagggccagcctcgcgaacctcaagtctgtacactgcctcctagccgcgaggaaatgaccaagaaccaggtgtccctgagctgcgccgtgaagggcttttacccttccgatatcgccgtggaatgggagagcaatggccagcctgagaacaactacaagacaacccctcctgtgctggacagcgacggctcattcttcctggtgtccaagctgacagtggacaagagcagatggcagcagggcaacgtgttcagctgcagcgtgctgcatgaagccctgcacagccactacacccagaagtccctgtctctgagccccggcaagtgataa

SEQ ID NO: 1228 - DNA, 996 bp, synthetic construct
  source 1..996: mol_type = other DNA
gcctctacaaagggccctagcgtgttccctctggctcctagcagcaagtcgacatctggcggaacagccgctctgggctgtctggtcaaggactactttcccgagcctgtgacagtgtcctggaactctggcgctctgacaagcggcgtgcacacatttccagccgtgctgcaaagcagcggcctgtactctctgagcagcgtggtcacagtgccaagctctagcctgggcacccagacctacatctgcaatgtgaaccacaagcctagcaacaccaaggtggacaagaaggtggaacccaagagctgcgacaagacccacacctgtcctccatgtcctgctccagaactgctggccggaccttccgtgttcctgtttcctccaaagcctaaggacaccctgatgatcagcagaacccctgaagtgacctgcgtggtggtggatgtgtctcacgaggaccctgaagtgaagttcaattggtacgtggacggcgtggaagtgcacaacgccaagaccaagcctagagaggaacagtacaacagcacctacagagtggtgtccgtgctgaccgtgctgcaccaggattggctgaacggcaaagagtacaagtgcaaggtgtccaacaaggccctgcctctgcctgaggaaaagaccatcagcaaggccaagggccagcctagggaaccccaggtttacaccctgcctccatgccgcgaggaaatgaccaagaaccaggtgtccctgtggtgcctggtcaagggcttctacccttccgatatcgccgtggaatgggagagcaatggccagcctgagaacaactacaagacaacccctcctgtgctggacagcgacggctcattcttcctgtacagcaagctgacagtggacaagagcagatggcagcagggcaacgtgttcagctgcagcgtgctgcatgaagccctgcacagccactacacccagaagtccctgtctctgagccccggcaagtgataa

SEQ ID NO: 1229 - DNA, 996 bp, synthetic construct
  source 1..996: mol_type = other DNA
gcctctacaaagggccctagcgtgttccctctggctcctagcagcaagtcgacatctggcggaacagccgctctgggctgtctggtcaaggactactttcccgagcctgtgacagtgtcctggaactctggcgctctgacaagcggcgtgcacacatttccagccgtgctgcaaagcagcggcctgtactctctgagcagcgtggtcacagtgccaagctctagcctgggcacccagacctacatctgcaatgtgaaccacaagcctagcaacaccaaggtggacaagaaggtggaacccaagagctgcgacaagacccacacctgtcctccatgtcctgctccagaactgctggccggaccttccgtgttcctgtttcctccaaagcctaaggacaccctgatgatcagcagaacccctgaagtgacctgcgtggtggtggatgtgtctcacgaggaccctgaagtgaagttcaattggtacgtggacggcgtggaagtgcacaacgccaagaccaagcctagagaggaacagtacaacagcacctacagagtggtgtccgtgctgaccgtgctgcaccaggattggctgaacggcaaagagtacaagtgcaaggtgtccaacaaggccctgcctgcccctgaggaaaagaccatcagcaaggccaagggccagcctagggaaccccaggtttacaccctgcctccatgccgcgaggaaatgaccaagaaccaggtgtccctgtggtgcctggtcaagggcttctacccttccgatatcgccgtggaatgggagagcaatggccagcctgagaacaactacaagacaacccctcctgtgctggacagcgacggctcattcttcctgtacagcaagctgacagtggacaagagcagatggcagcagggcaacgtgttcagctgcagcgtgctgcatgaagccctgcacagccactacacccagaagtccctgtctctgagccccggcaagtgataa

SEQ ID NO: 1230 - DNA, 996 bp, synthetic construct
  source 1..996: mol_type = other DNA
gcctctacaaagggccctagcgtgttccctctggctcctagcagcaagtcgacatctggcggaacagccgctctgggctgtctggtcaaggactactttcccgagcctgtgacagtgtcctggaactctggcgctctgacaagcggcgtgcacacatttccagccgtgctgcaaagcagcggcctgtactctctgagcagcgtggtcacagtgccaagctctagcctgggcacccagacctacatctgcaatgtgaaccacaagcctagcaacaccaaggtggacaagaaggtggaacccaagagctgcgacaagacccacacctgtcctccatgtcctgctccagaactgctggccggaccttccgtgttcctgtttcctccaaagcctaaggacaccctgatgatcagcagaacccctgaagtgacctgcgtggtggtggatgtgtctcacgaggaccctgaagtgaagttcaattggtacgtggacggcgtggaagtgcacaacgccaagaccaagcctagagaggaacagtacaacagcacctacagagtggtgtccgtgctgaccgtgctgcaccaggattggctgaacggcaaagagtacaagtgcaaggtgtccaacaaggccctgcctgcccctatcgaaaagaccatcagcaaggccaagggccagcctagggaaccccaggtttacacactgcctccaagccgcgacgaactgaccaagaaccaggtgtccctgacctgcctcgtgaagggcttctacccttccgatatcgccgtggaatgggagagcaatggccagcctgagaacaactacaagacaacccctcctgtgctggacagcgacggctcattcttcctgtacagcaagctgaccgtggacaagtccagatggcagcagggcaacgtgttcagctgtagcgtgctgcacgaagccctgcacagccactacacccagaaaagcctgtctctgagccccggcaaatgataa

SEQ ID NO: 1231 - DNA, 996 bp, synthetic construct
  source 1..996: mol_type = other DNA
gcctctacaaagggccctagcgtgttccctctggctcctagcagcaagtcgacatctggcggaacagccgctctgggctgtctggtcaaggactactttcccgagcctgtgacagtgtcctggaactctggcgctctgacaagcggcgtgcacacatttccagccgtgctgcaaagcagcggcctgtactctctgagcagcgtggtcacagtgccaagctctagcctgggcacccagacctacatctgcaatgtgaaccacaagcctagcaacaccaaggtggacaagaaggtggaacccaagagctgcgacaagacccacacctgtcctccatgtcctgctccagaactgctgggcggaccttccgtgttcctgtttcctccaaagcctaaggacaccctgatgatcagcagaacccctgaagtgacctgcgtggtggtggatgtgtctcacgaggaccctgaagtgaagttcaattggtacgtggacggcgtggaagtgcacaacgccaagaccaagcctagagaggaacagtacaacagcacctacagagtggtgtccgtgctgaccgtgctgcaccaggattggctgaacggcaaagagtacaagtgcaaggtgtccaacaaggccctgcctgcccctgaggaaaagaccatcagcaaggccaagggccagcctagggaaccccaggtttacacactgcctccaagccgcgacgaactgaccaagaaccaggtgtccctgacctgcctcgtgaagggcttctacccttccgatatcgccgtggaatgggagagcaatggccagcctgagaacaactacaagacaacccctcctgtgctggacagcgacggctcattcttcctgtacagcaagctgaccgtggacaagtccagatggcagcagggcaacgtgttcagctgtagcgtgctgcacgaagccctgcacagccactacacccagaaaagcctgtctctgagccccggcaaatgataa

SEQ ID NO: 1232 - DNA, 996 bp, synthetic construct
  source 1..996: mol_type = other DNA
gcctctacaaagggccctagcgtgttccctctggctcctagcagcaagtcgacatctggcggaacagccgctctgggctgtctggtcaaggactactttcccgagcctgtgacagtgtcctggaactctggcgctctgacaagcggcgtgcacacatttccagccgtgctgcaaagcagcggcctgtactctctgagcagcgtggtcacagtgccaagctctagcctgggcacccagacctacatctgcaatgtgaaccacaagcctagcaacaccaaggtggacaagaaggtggaacccaagagctgcgacaagacccacacctgtcctccatgtcctgctccagaactgctcggcggaccttccgtgttcctgtttcctccaaagcctaaggacaccctgatgatcagcagaacccctgaagtgacctgcgtggtggtggatgtgtctcacgaggacccagaagtgaagttcaattggtacgtggacggcgtggaagtgcacaacgccaagaccaagcctagagaggaacagtacaacagcacctacagagtggtgtccgtgctgacagtgctgcaccaggattggctgaacggcaaagagtacaagtgcaaggtgtccaacaaggccctgcctgctcctatcgagaaaaccatcagcaaggccaagggccagcctcgcgaacctcaagtctgtacactgcctcctagccgcgacgaactgaccaagaaccaggtgtccctgagctgcgccgtgaagggcttttacccttccgatatcgccgtggaatgggagagcaatggccagcctgagaacaactacaagacaacccctcctgtgctggacagcgacggctcattcttcctggtgtccaagctgacagtggacaagagcagatggcagcagggcaacgtgttcagctgcagcgtgctgcatgaagccctgcacagccactacacccagaagtccctgtctctgagccccggcaagtgataa

SEQ ID NO: 1233 - DNA, 996 bp, synthetic construct
  source 1..996: mol_type = other DNA
gcctctacaaagggccctagcgtgttccctctggctcctagcagcaagtcgacatctggcggaacagccgctctgggctgtctggtcaaggactactttcccgagcctgtgacagtgtcctggaactctggcgctctgacaagcggcgtgcacacatttccagccgtgctgcaaagcagcggcctgtactctctgagcagcgtggtcacagtgccaagctctagcctgggcacccagacctacatctgcaatgtgaaccacaagcctagcaacaccaaggtggacaagaaggtggaacccaagagctgcgacaagacccacacctgtcctccatgtcctgctccagaactgctggccggaccttccgtgttcctgtttcctccaaagcctaaggacaccctgatgatcagcagaacccctgaagtgacctgcgtggtggtggatgtgtctcacgaggaccctgaagtgaagttcaattggtacgtggacggcgtggaagtgcacaacgccaagaccaagcctagagaggaacagtacaacagcacctacagagtggtgtccgtgctgaccgtgctgcaccaggattggctgaacggcaaagagtacaagtgcaaggtgtccaacaaggccctgcctctgcctgaggaaaagaccatcagcaaggccaagggccagcctcgcgaacctcaagtctgtacactgcctcctagccgcgacgaactgaccaagaaccaggtgtccctgagctgcgccgtgaagggcttttacccttccgatatcgccgtggaatgggagagcaatggccagcctgagaacaactacaagacaacccctcctgtgctggacagcgacggctcattcttcctggtgtccaagctgacagtggacaagagcagatggcagcagggcaacgtgttcagctgcagcgtgctgcatgaagccctgcacagccactacacccagaagtccctgtctctgagccccggcaagtgataa

SEQ ID NO: 1234 - DNA, 996 bp, synthetic construct
  source 1..996: mol_type = other DNA
gcctctacaaagggccctagcgtgttccctctggctcctagcagcaagtcgacatctggcggaacagccgctctgggctgtctggtcaaggactactttcccgagcctgtgacagtgtcctggaactctggcgctctgacaagcggcgtgcacacatttccagccgtgctgcaaagcagcggcctgtactctctgagcagcgtggtcacagtgccaagctctagcctgggcacccagacctacatctgcaatgtgaaccacaagcctagcaacaccaaggtggacaagaaggtggaacccaagagctgcgacaagacccacacctgtcctccatgtcctgctccagaactgctggccggaccttccgtgttcctgtttcctccaaagcctaaggacaccctgatgatcagcagaacccctgaagtgacctgcgtggtggtggatgtgtctcacgaggaccctgaagtgaagttcaattggtacgtggacggcgtggaagtgcacaacgccaagaccaagcctagagaggaacagtacaacagcacctacagagtggtgtccgtgctgaccgtgctgcaccaggattggctgaacggcaaagagtacaagtgcaaggtgtccaacaaggccctgcctgcccctgaggaaaagaccatcagcaaggccaagggccagcctcgcgaacctcaagtctgtacactgcctcctagccgcgacgaactgaccaagaaccaggtgtccctgagctgcgccgtgaagggcttttacccttccgatatcgccgtggaatgggagagcaatggccagcctgagaacaactacaagacaacccctcctgtgctggacagcgacggctcattcttcctggtgtccaagctgacagtggacaagagcagatggcagcagggcaacgtgttcagctgcagcgtgctgcatgaagccctgcacagccactacacccagaagtccctgtctctgagccccggcaagtgataa

SEQ ID NO: 1235 - DNA, 996 bp, synthetic construct
  source 1..996: mol_type = other DNA
gcctctacaaagggccctagcgtgttccctctggctcctagcagcaagtcgacatctggcggaacagccgctctgggctgtctggtcaaggactactttcccgagcctgtgacagtgtcctggaactctggcgctctgacaagcggcgtgcacacatttccagccgtgctgcaaagcagcggcctgtactctctgagcagcgtggtcacagtgccaagctctagcctgggcacccagacctacatctgcaatgtgaaccacaagcctagcaacaccaaggtggacaagaaggtggaacccaagagctgcgacaagacccacacctgtcctccatgtcctgctccagaactgctggccggaccttccgtgttcctgtttcctccaaagcctaaggacaccctgatgatcagcagaacccctgaagtgacctgcgtggtggtggatgtgtctcacgaggaccctgaagtgaagttcaattggtacgtggacggcgtggaagtgcacaacgccaagaccaagcctagagaggaacagtacaacagcacctacagagtggtgtccgtgctgaccgtgctgcaccaggattggctgaacggcaaagagtacaagtgcaaggtgtccaacaaggccctgcctctgcctgaggaaaagaccatcagcaaggccaagggccagcctagggaaccccaggtttacaccctgcctccatgccgcgacgaactgaccaagaaccaggtgtccctgtggtgcctggtcaagggcttctacccttccgatatcgccgtggaatgggagagcaatggccagcctgagaacaactacaagacaacccctcctgtgctggacagcgacggctcattcttcctgtacagcaagctgacagtggacaagagcagatggcagcagggcaacgtgttcagctgcagcgtgctgcatgaagccctgcacagccactacacccagaagtccctgtctctgagccccggcaagtgataa

SEQ ID NO: 1236 - DNA, 996 bp, synthetic construct
  source 1..996: mol_type = other DNA
gcctctacaaagggccctagcgtgttccctctggctcctagcagcaagtcgacatctggcggaacagccgctctgggctgtctggtcaaggactactttcccgagcctgtgacagtgtcctggaactctggcgctctgacaagcggcgtgcacacatttccagccgtgctgcaaagcagcggcctgtactctctgagcagcgtggtcacagtgccaagctctagcctgggcacccagacctacatctgcaatgtgaaccacaagcctagcaacaccaaggtggacaagaaggtggaacccaagagctgcgacaagacccacacctgtcctccatgtcctgctccagaactgctggccggaccttccgtgttcctgtttcctccaaagcctaaggacaccctgatgatcagcagaacccctgaagtgacctgcgtggtggtggatgtgtctcacgaggaccctgaagtgaagttcaattggtacgtggacggcgtggaagtgcacaacgccaagaccaagcctagagaggaacagtacaacagcacctacagagtggtgtccgtgctgaccgtgctgcaccaggattggctgaacggcaaagagtacaagtgcaaggtgtccaacaaggccctgcctgcccctgaggaaaagaccatcagcaaggccaagggccagcctagggaaccccaggtttacaccctgcctccatgccgcgacgaactgaccaagaaccaggtgtccctgtggtgcctggtcaagggcttctacccttccgatatcgccgtggaatgggagagcaatggccagcctgagaacaactacaagacaacccctcctgtgctggacagcgacggctcattcttcctgtacagcaagctgacagtggacaagagcagatggcagcagggcaacgtgttcagctgcagcgtgctgcatgaagccctgcacagccactacacccagaagtccctgtctctgagccccggcaagtgataa

SEQ ID NO: 1237 - DNA, 702 bp, synthetic construct
  source 1..702: mol_type = other DNA
gaacctaagagcagcgacaagacccacacctgtcctccatgtcctgctccagaactgctcggcggaccttccgtgttcctgtttcctccaaagcctaaggacaccctgatgatcagcagaacccctgaagtgacctgcgtggtggtggatgtgtctcacgaggacccagaagtgaagttcaattggtacgtggacggcgtggaagtgcacaacgccaagaccaagcctagagaggaacagtacaacagcacctacagagtggtgtccgtgctgacagtgctgcaccaggattggctgaacggcaaagagtacaagtgcaaggtgtccaacaaggccctgcctgctcctatcgagaaaaccatcagcaaggccaagggccagcctcgcgaacctcaagtctgtacactgcctcctagccgcgaggaaatgaccaagaaccaggtgtccctgagctgcgccgtgaagggcttttacccttccgatatcgccgtggaatgggagagcaatggccagcctgagaacaactacaagacaacccctcctgtgctggacagcgacggctcattcttcctggtgtccaagctgacagtggacaagagcagatggcagcagggcaacgtgttcagctgcagcgtgctgcatgaagccctgcacagccactacacccagaagtccctgtctctgagccccggcaagtgataa

SEQ ID NO: 1238 - DNA, 702 bp, synthetic construct
  source 1..702: mol_type = other DNA
gaacctaagagcagcgacaagacccacacctgtcctccatgtcctgctccagaactgctggccggaccttccgtgttcctgtttcctccaaagcctaaggacaccctgatgatcagcagaacccctgaagtgacctgcgtggtggtggatgtgtctcacgaggaccctgaagtgaagttcaattggtacgtggacggcgtggaagtgcacaacgccaagaccaagcctagagaggaacagtacaacagcacctacagagtggtgtccgtgctgaccgtgctgcaccaggattggctgaacggcaaagagtacaagtgcaaggtgtccaacaaggccctgcctctgcctgaggaaaagaccatcagcaaggccaagggccagcctcgcgaacctcaagtctgtacactgcctcctagccgcgaggaaatgaccaagaaccaggtgtccctgagctgcgccgtgaagggcttttacccttccgatatcgccgtggaatgggagagcaatggccagcctgagaacaactacaagacaacccctcctgtgctggacagcgacggctcattcttcctggtgtccaagctgacagtggacaagagcagatggcagcagggcaacgtgttcagctgcagcgtgctgcatgaagccctgcacagccactacacccagaagtccctgtctctgagccccggcaagtgataa

SEQ ID NO: 1239 - DNA, 702 bp, synthetic construct
  source 1..702: mol_type = other DNA
gaacctaagagcagcgacaagacccacacctgtcctccatgtcctgctccagaactgctggccggaccttccgtgttcctgtttcctccaaagcctaaggacaccctgatgatcagcagaacccctgaagtgacctgcgtggtggtggatgtgtctcacgaggaccctgaagtgaagttcaattggtacgtggacggcgtggaagtgcacaacgccaagaccaagcctagagaggaacagtacaacagcacctacagagtggtgtccgtgctgaccgtgctgcaccaggattggctgaacggcaaagagtacaagtgcaaggtgtccaacaaggccctgcctgcccctgaggaaaagaccatcagcaaggccaagggccagcctcgcgaacctcaagtctgtacactgcctcctagccgcgaggaaatgaccaagaaccaggtgtccctgagctgcgccgtgaagggcttttacccttccgatatcgccgtggaatgggagagcaatggccagcctgagaacaactacaagacaacccctcctgtgctggacagcgacggctcattcttcctggtgtccaagctgacagtggacaagagcagatggcagcagggcaacgtgttcagctgcagcgtgctgcatgaagccctgcacagccactacacccagaagtccctgtctctgagccccggcaagtgataa

SEQ ID NO: 1240 - DNA, 702 bp, synthetic construct
  source 1..702: mol_type = other DNA
gaacctaagagcagcgacaagacccacacctgtcctccatgtcctgctccagaactgctcggcggaccttccgtgttcctgtttcctccaaagcctaaggacaccctgatgatcagcagaacccctgaagtgacctgcgtggtggtggatgtgtctcacgaggacccagaagtgaagttcaattggtacgtggacggcgtggaagtgcacaacgccaagaccaagcctagagaggaacagtacaacagcacctacagagtggtgtccgtgctgacagtgctgcaccaggattggctgaacggcaaagagtacaagtgcaaggtgtccaacaaggccctgcctgctcctatcgagaaaaccatcagcaaggccaagggccagcctagggaaccccaggtttacaccctgcctccatgccgcgaggaaatgaccaagaaccaggtgtccctgtggtgcctggtcaagggcttctacccttccgatatcgccgtggaatgggagagcaatggccagcctgagaacaactacaagacaacccctcctgtgctggacagcgacggctcattcttcctgtacagcaagctgacagtggacaagagcagatggcagcagggcaacgtgttcagctgcagcgtgctgcatgaagccctgcacagccactacacccagaagtccctgtctctgagccccggcaagtgataa

SEQ ID NO: 1241 - DNA, 702 bp, synthetic construct
  source 1..702: mol_type = other DNA
gaacctaagagcagcgacaagacccacacctgtcctccatgtcctgctccagaactgctggccggaccttccgtgttcctgtttcctccaaagcctaaggacaccctgatgatcagcagaacccctgaagtgacctgcgtggtggtggatgtgtctcacgaggaccctgaagtgaagttcaattggtacgtggacggcgtggaagtgcacaacgccaagaccaagcctagagaggaacagtacaacagcacctacagagtggtgtccgtgctgaccgtgctgcaccaggattggctgaacggcaaagagtacaagtgcaaggtgtccaacaaggccctgcctctgcctgaggaaaagaccatcagcaaggccaagggccagcctagggaaccccaggtttacaccctgcctccatgccgcgaggaaatgaccaagaaccaggtgtccctgtggtgcctggtcaagggcttctacccttccgatatcgccgtggaatgggagagcaatggccagcctgagaacaactacaagacaacccctcctgtgctggacagcgacggctcattcttcctgtacagcaagctgacagtggacaagagcagatggcagcagggcaacgtgttcagctgcagcgtgctgcatgaagccctgcacagccactacacccagaagtccctgtctctgagccccggcaagtgataa

SEQ ID NO: 1242 - DNA, 702 bp, synthetic construct
  source 1..702: mol_type = other DNA
gaacctaagagcagcgacaagacccacacctgtcctccatgtcctgctccagaactgctggccggaccttccgtgttcctgtttcctccaaagcctaaggacaccctgatgatcagcagaacccctgaagtgacctgcgtggtggtggatgtgtctcacgaggaccctgaagtgaagttcaattggtacgtggacggcgtggaagtgcacaacgccaagaccaagcctagagaggaacagtacaacagcacctacagagtggtgtccgtgctgaccgtgctgcaccaggattggctgaacggcaaagagtacaagtgcaaggtgtccaacaaggccctgcctgcccctgaggaaaagaccatcagcaaggccaagggccagcctagggaaccccaggtttacaccctgcctccatgccgcgaggaaatgaccaagaaccaggtgtccctgtggtgcctggtcaagggcttctacccttccgatatcgccgtggaatgggagagcaatggccagcctgagaacaactacaagacaacccctcctgtgctggacagcgacggctcattcttcctgtacagcaagctgacagtggacaagagcagatggcagcagggcaacgtgttcagctgcagcgtgctgcatgaagccctgcacagccactacacccagaagtccctgtctctgagccccggcaagtgataa

SEQ ID NO: 1243 - DNA, 702 bp, synthetic construct; identical to SEQ ID NO: 1237
  source 1..702: mol_type = other DNA

SEQ ID NO: 1244 - DNA, 702 bp, synthetic construct; identical to SEQ ID NO: 1238
  source 1..702: mol_type = other DNA

SEQ ID NO: 1245 - DNA, 702 bp, synthetic construct; identical to SEQ ID NO: 1239
  source 1..702: mol_type = other DNA

SEQ ID NO: 1246 - DNA, 702 bp, synthetic construct; identical to SEQ ID NO: 1240
  source 1..702: mol_type = other DNA

SEQ ID NO: 1247 - DNA, 702 bp, synthetic construct; identical to SEQ ID NO: 1241
  source 1..702: mol_type = other DNA

SEQ ID NO: 1248 - DNA, 702 bp, synthetic construct; identical to SEQ ID NO: 1242
  source 1..702: mol_type = other DNA

SEQ ID NO: 1249 - DNA, 702 bp, synthetic construct
  source 1..702: mol_type = other DNA
gaacctaagagcagcgacaagacccacacctgtcctccatgtcctgctccagaactgctcggcggaccttccgtgttcctgtttcctccaaagcctaaggacaccctgatgatcagcagaacccctgaagtgacctgcgtggtggtggatgtgtctcacgaggacccagaagtgaagttcaattggtacgtggacggcgtggaagtgcacaacgccaagaccaagcctagagaggaacagtacaacagcacctacagagtggtgtccgtgctgacagtgctgcaccaggattggctgaacggcaaagagtacaagtgcaaggtgtccaacaaggccctgcctgctcctatcgagaaaaccatcagcaaggccaagggccagcctcgcgaacctcaagtctgtacactgcctcctagccgcgacgaactgaccaagaaccaggtgtccctgagctgcgccgtgaagggcttttacccttccgatatcgccgtggaatgggagagcaatggccagcctgagaacaactacaagacaacccctcctgtgctggacagcgacggctcattcttcctggtgtccaagctgacagtggacaagagcagatggcagcagggcaacgtgttcagctgcagcgtgctgcatgaagccctgcacagccactacacccagaagtccctgtctctgagccccggcaagtgataa

SEQ ID NO: 1250 - DNA, 702 bp, synthetic construct
  source 1..702: mol_type = other DNA
gaacctaagagcagcgacaagacccacacctgtcctccatgtcctgctccagaactgctggccggaccttccgtgttcctgtttcctccaaagcctaaggacaccctgatgatcagcagaacccctgaagtgacctgcgtggtggtggatgtgtctcacgaggaccctgaagtgaagttcaattggtacgtggacggcgtggaagtgcacaacgccaagaccaagcctagagaggaacagtacaacagcacctacagagtggtgtccgtgctgaccgtgctgcaccaggattggctgaacggcaaagagtacaagtgcaaggtgtccaacaaggccctgcctctgcctgaggaaaagaccatcagcaaggccaagggccagcctcgcgaacctcaagtctgtacactgcctcctagccgcgacgaactgaccaagaaccaggtgtccctgagctgcgccgtgaagggcttttacccttccgatatcgccgtggaatgggagagcaatggccagcctgagaacaactacaagacaacccctcctgtgctggacagcgacggctcattcttcctggtgtccaagctgacagtggacaagagcagatggcagcagggcaacgtgttcagctgcagcgtgctgcatgaagccctgcacagccactacacccagaagtccctgtctctgagccccggcaagtgataa

SEQ ID NO: 1251 - DNA, 702 bp, synthetic construct
  source 1..702: mol_type = other DNA
gaacctaagagcagcgacaagacccacacctgtcctccatgtcctgctccagaactgctggccggaccttccgtgttcctgtttcctccaaagcctaaggacaccctgatgatcagcagaacccctgaagtgacctgcgtggtggtggatgtgtctcacgaggaccctgaagtgaagttcaattggtacgtggacggcgtggaagtgcacaacgccaagaccaagcctagagaggaacagtacaacagcacctacagagtggtgtccgtgctgaccgtgctgcaccaggattggctgaacggcaaagagtacaagtgcaaggtgtccaacaaggccctgcctgcccctgaggaaaagaccatcagcaaggccaagggccagcctcgcgaacctcaagtctgtacactgcctcctagccgcgacgaactgaccaagaaccaggtgtccctgagctgcgccgtgaagggcttttacccttccgatatcgccgtggaatgggagagcaatggccagcctgagaacaactacaagacaacccctcctgtgctggacagcgacggctcattcttcctggtgtccaagctgacagtggacaagagcagatggcagcagggcaacgtgttcagctgcagcgtgctgcatgaagccctgcacagccactacacccagaagtccctgtctctgagccccggcaagtgataa

SEQ ID NO: 1252 - DNA, 702 bp, synthetic construct
  source 1..702: mol_type = other DNA
gaacctaagagcagcgacaagacccacacctgtcctccatgtcctgctccagaactgctcggcggaccttccgtgttcctgtttcctccaaagcctaaggacaccctgatgatcagcagaacccctgaagtgacctgcgtggtggtggatgtgtctcacgaggacccagaagtgaagttcaattggtacgtggacggcgtggaagtgcacaacgccaagaccaagcctagagaggaacagtacaacagcacctacagagtggtgtccgtgctgacagtgctgcaccaggattggctgaacggcaaagagtacaagtgcaaggtgtccaacaaggccctgcctgctcctatcgagaaaaccatcagcaaggccaagggccagcctagggaaccccaggtttacaccctgcctccatgccgcgacgaactgaccaagaaccaggtgtccctgtggtgcctggtcaagggcttctacccttccgatatcgccgtggaatgggagagcaatggccagcctgagaacaactacaagacaacccctcctgtgctggacagcgacggctcattcttcctgtacagcaagctgacagtggacaagagcagatggcagcagggcaacgtgttcagctgcagcgtgctgcatgaagccctgcacagccactacacccagaagtccctgtctctgagccccggcaagtgataa

SEQ ID NO: 1253 - DNA, 702 bp, synthetic construct
  source 1..702: mol_type = other DNA
gaacctaagagcagcgacaagacccacacctgtcctccatgtcctgctccagaactgctggccggaccttccgtgttcctgtttcctccaaagcctaaggacaccctgatgatcagcagaacccctgaagtgacctgcgtggtggtggatgtgtctcacgaggaccctgaagtgaagttcaattggtacgtggacggcgtggaagtgcacaacgccaagaccaagcctagagaggaacagtacaacagcacctacagagtggtgtccgtgctgaccgtgctgcaccaggattggctgaacggcaaagagtacaagtgcaaggtgtccaacaaggccctgcctctgcctgaggaaaagaccatcagcaaggccaagggccagcctagggaaccccaggtttacaccctgcctccatgccgcgacgaactgaccaagaaccaggtgtccctgtggtgcctggtcaagggcttctacccttccgatatcgccgtggaatgggagagcaatggccagcctgagaacaactacaagacaacccctcctgtgctggacagcgacggctcattcttcctgtacagcaagctgacagtggacaagagcagatggcagcagggcaacgtgttcagctgcagcgtgctgcatgaagccctgcacagccactacacccagaagtccctgtctctgagccccggcaagtgataa

SEQ ID NO: 1254 - DNA, 702 bp, synthetic construct
  source 1..702: mol_type = other DNA
gaacctaagagcagcgacaagacccacacctgtcctccatgtcctgctccagaactgctggccggaccttccgtgttcctgtttcctccaaagcctaaggacaccctgatgatcagcagaacccctgaagtgacctgcgtggtggtggatgtgtctcacgaggaccctgaagtgaagttcaattggtacgtggacggcgtggaagtgcacaacgccaagaccaagcctagagaggaacagtacaacagcacctacagagtggtgtccgtgctgaccgtgctgcaccaggattggctgaacggcaaagagtacaagtgcaaggtgtccaacaaggccctgcctgcccctgaggaaaagaccatcagcaaggccaagggccagcctagggaaccccaggtttacaccctgcctccatgccgcgacgaactgaccaagaaccaggtgtccctgtggtgcctggtcaagggcttctacccttccgatatcgccgtggaatgggagagcaatggccagcctgagaacaactacaagacaacccctcctgtgctggacagcgacggctcattcttcctgtacagcaagctgacagtggacaagagcagatggcagcagggcaacgtgttcagctgcagcgtgctgcatgaagccctgcacagccactacacccagaagtccctgtctctgagccccggcaagtgataa

SEQ ID NO: 1255 - DNA, 702 bp, synthetic construct
  source 1..702: mol_type = other DNA
gaacctaagagcagcgacaagacccacacctgtcctccatgtcctgctccagaactgctcggcggaccttccgtgttcctgtttcctccaaagcctaaggacaccctgatgatcagcagaacccctgaagtgacctgcgtggtggtggatgtgtctcacgaggacccagaagtgaagttcaattggtacgtggacggcgtggaagtgcacaacgccaagaccaagcctagagaggaacagtacaacagcacctacagagtggtgtccgtgctgacagtgctgcaccaggattggctgaacggcaaagagtacaagtgcaaggtgtccaacaaggccctgcctgctcctatcgagaaaaccatcagcaaggccaagggccagcctagggaaccccaggtttacacactgcctccaagccgcgaggaaatgaccaagaaccaggtgtccctgacctgcctcgtgaagggcttctacccttccgatatcgccgtggaatgggagagcaatggccagcctgagaacaactacaagacaacccctcctgtgctggacagcgacggctcattcttcctgtacagcaagctgactgtggataagtcccggtggcagcagggcaacgtgttcagctgttctgtgatgcacgaagccctgcacaaccactacacccagaaaagcctgtctctgagccccggcaagtgataa

SEQ ID NO: 1256 - DNA, 702 bp, synthetic construct
  source 1..702: mol_type = other DNA
gaacctaagagcagcgacaagacccacacctgtcctccatgtcctgctccagaactgctggccggaccttccgtgttcctgtttcctccaaagcctaaggacaccctgatgatcagcagaacccctgaagtgacctgcgtggtggtggatgtgtctcacgaggaccctgaagtgaagttcaattggtacgtggacggcgtggaagtgcacaacgccaagaccaagcctagagaggaacagtacaacagcacctacagagtggtgtccgtgctgaccgtgctgcaccaggattggctgaacggcaaagagtacaagtgcaaggtgtccaacaaggccctgcctctgcctgaggaaaagaccatcagcaaggccaagggccagcctagggaaccccaggtttacacactgcctccaagccgcgaggaaatgaccaagaaccaggtgtccctgacctgcctcgtgaagggcttctacccttccgatatcgccgtggaatgggagagcaatggccagcctgagaacaactacaagacaacccctcctgtgctggacagcgacggctcattcttcctgtacagcaagctgaccgtggacaagtccagatggcagcagggcaacgtgttcagctgtagcgtgctgcacgaagccctgcacagccactacacccagaaaagcctgtctctgagccccggcaaatgataa

SEQ ID NO: 1257 - DNA, 702 bp, synthetic construct
  source 1..702: mol_type = other DNA
gaacctaagagcagcgacaagacccacacctgtcctccatgtcctgctccagaactgctggccggaccttccgtgttcctgtttcctccaaagcctaaggacaccctgatgatcagcagaacccctgaagtgacctgcgtggtggtggatgtgtctcacgaggaccctgaagtgaagttcaattggtacgtggacggcgtggaagtgcacaacgccaagaccaagcctagagaggaacagtacaacagcacctacagagtggtgtccgtgctgaccgtgctgcaccaggattggctgaacggcaaagagtacaagtgcaaggtgtccaacaaggccctgcctgcccctgaggaaaagaccatcagcaaggccaagggccagcctagggaaccccaggtttacacactgcctccaagccgcgaggaaatgaccaagaaccaggtgtccctgacctgcctcgtgaagggcttctacccttccgatatcgccgtggaatgggagagcaatggccagcctgagaacaactacaagacaacccctcctgtgctggacagcgacggctcattcttcctgtacagcaagctgaccgtggacaagtccagatggcagcagggcaacgtgttcagctgtagcgtgctgcacgaagccctgcacagccactacacccagaaaagcctgtctctgagccccggcaaatgataa

SEQ ID NO: 1258 - DNA, 702 bp, synthetic construct; identical to SEQ ID NO: 1255
  source 1..702: mol_type = other DNA

SEQ ID NO: 1259 - DNA, 702 bp, synthetic construct
  source 1..702: mol_type = other DNA
gaacctaagagcagcgacaagacccacacctgtcctccatgtcctgctccagaactgctcggcggaccttccgtgttcctgtttcctccaaagcctaaggacaccctgatgatcagcagaacccctgaagtgacctgcgtggtggtggatgtgtctcacgaggacccagaagtgaagttcaattggtacgtggacggcgtggaagtgcacaacgccaagaccaagcctagagaggaacagtacaacagcacctacagagtggtgtccgtgctgacagtgctgcaccaggattggctgaacggcaaagagtacaagtgcaaggtgtccaacaaggccctgcctgctcctatcgagaaaaccatcagcaaggccaagggccagcctagggaaccccaggtttacacactgcctccaagccgcgaggaaatgaccaagaaccaggtgtccctgacctgcctcgtgaagggcttctacccttccgatatcgccgtggaatgggagagcaatggccagcctgagaacaactacaagacaacccctcctgtgctggacagcgacggctcattcttcctgtacagcaagctgaccgtggacaagtccagatggcagcagggcaacgtgttcagctgtagcgtgctgcacgaagccctgcacagccactacacccagaaaagcctgtctctgagccccggcaaatgataa

SEQ ID NO: 1260 - DNA, 702 bp, synthetic construct; identical to SEQ ID NO: 1256
  source 1..702: mol_type = other DNA

SEQ ID NO: 1261 - DNA, 702 bp, synthetic construct; identical to SEQ ID NO: 1257
  source 1..702: mol_type = other DNA

SEQ ID NO: 1262 - DNA, 702 bp, synthetic construct
  source 1..702: mol_type = other DNA
gaacctaagagcagcgacaagacccacacctgtcctccatgtcctgctccagaactgctcggcggaccttccgtgttcctgtttcctccaaagcctaaggacaccctgatgatcagcagaacccctgaagtgacctgcgtggtggtggatgtgtctcacgaggacccagaagtgaagttcaattggtacgtggacggcgtggaagtgcacaacgccaagaccaagcctagagaggaacagtacaacagcacctacagagtggtgtccgtgctgacagtgctgcaccaggattggctgaacggcaaagagtacaagtgcaaggtgtccaacaaggccctgcctgctcctatcgagaaaaccatcagcaaggccaagggccagcctagggaaccccaggtttacacactgcctccaagccgcgacgaactgaccaagaaccaggtgtccctgacctgcctcgtgaagggcttctacccttccgatatcgccgtggaatgggagagcaatggccagcctgagaacaactacaagacaacccctcctgtgctggacagcgacggctcattcttcctgtacagcaagctgactgtggataagtcccggtggcagcagggcaacgtgttcagctgttctgtgatgcacgaagccctgcacaaccactacacccagaaaagcctgtctctgagccccggcaagtgataa

SEQ ID NO: 1263 - DNA, 702 bp, synthetic construct
  source 1..702: mol_type = other DNA
gaacctaagagcagcgacaagacccacacctgtcctccatgtcctgctccagaactgctcggcggaccttccgtgttcctgtttcctccaaagcctaaggacaccctgatgatcagcagaacccctgaagtgacctgcgtggtggtggatgtgtctcacgaggacccagaagtgaagttcaattggtacgtggacggcgtggaagtgcacaacgccaagaccaagcctagagaggaacagtacaacagcacctacagagtggtgtccgtgctgacagtgctgcaccaggattggctgaacggcaaagagtacaagtgcaaggtgtccaacaaggccctgcctgctcctatcgagaaaaccatcagcaaggccaagggccagcctagggaaccccaggtttacacactgcctccaagccgcgacgaactgaccaagaaccaggtgtccctgacctgcctcgtgaagggcttctacccttccgatatcgccgtggaatgggagagcaatggccagcctgagaacaactacaagacaacccctcctgtgctggacagcgacggctcattcttcctgtacagcaagctgaccgtggacaagtccagatggcagcagggcaacgtgttcagctgtagcgtgctgcacgaagccctgcacagccactacacccagaaaagcctgtctctgagccccggcaaatgataa

SEQ ID NO: 1264 - DNA, 702 bp, synthetic construct
  source 1..702: mol_type = other DNA
gaacctaagagcagcgacaagacccacacctgtcctccatgtcctgctccagaactgctggccggaccttccgtgttcctgtttcctccaaagcctaaggacaccctgatgatcagcagaacccctgaagtgacctgcgtggtggtggatgtgtctcacgaggaccctgaagtgaagttcaattggtacgtggacggcgtggaagtgcacaacgccaagaccaagcctagagaggaacagtacaacagcacctacagagtggtgtccgtgctgaccgtgctgcaccaggattggctgaacggcaaagagtacaagtgcaaggtgtccaacaaggccctgcctctgcctgaggaaaagaccatcagcaaggccaagggccagcctagggaaccccaggtttacacactgcctccaagccgcgacgaactgaccaagaaccaggtgtccctgacctgcctcgtgaagggcttctacccttccgatatcgccgtggaatgggagagcaatggccagcctgagaacaactacaagacaacccctcctgtgctggacagcgacggctcattcttcctgtacagcaagctgaccgtggacaagtccagatggcagcagggcaacgtgttcagctgtagcgtgctgcacgaagccctgcacagccactacacccagaaaagcctgtctctgagccccggcaaatgataa

SEQ ID NO: 1265 - DNA, 702 bp, synthetic construct
  source 1..702: mol_type = other DNA
gaacctaagagcagcgacaagacccacacctgtcctccatgtcctgctccagaactgctggccggaccttccgtgttcctgtttcctccaaagcctaaggacaccctgatgatcagcagaacccctgaagtgacctgcgtggtggtggatgtgtctcacgaggaccctgaagtgaagttcaattggtacgtggacggcgtggaagtgcacaacgccaagaccaagcctagagaggaacagtacaacagcacctacagagtggtgtccgtgctgaccgtgctgcaccaggattggctgaacggcaaagagtacaagtgcaaggtgtccaacaaggccctgcctgcccctgaggaaaagaccatcagcaaggccaagggccagcctagggaaccccaggtttacacactgcctccaagccgcgacgaactgaccaagaaccaggtgtccctgacctgcctcgtgaagggcttctacccttccgatatcgccgtggaatgggagagcaatggccagcctgagaacaactacaagacaacccctcctgtgctggacagcgacggctcattcttcctgtacagcaagctgaccgtggacaagtccagatggcagcagggcaacgtgttcagctgtagcgtgctgcacgaagccctgcacagccactacacccagaaaagcctgtctctgagccccggcaaatgataa

SEQ ID NO: 1266 - DNA, 321 bp, synthetic construct; identical to SEQ ID NO: 95
  source 1..321: mol_type = other DNA

SEQ ID NO: 1267 - DNA, 687 bp, synthetic construct
  source 1..687: mol_type = other DNA
gataagacccacacctgtcctccatgtccagctccagaactgctcggcggaccttccgtgttcctgtttcctccaaagcctaaggacaccctgatgatcagcagaacccctgaagtgacctgcgtggtggtggatgtgtctcacgaggacccagaagtgaagttcaattggtacgtggacggcgtggaagtgcacaacgccaagaccaagcctagagaggaacagtacaacagcacctacagagtggtgtccgtgctgacagtgctgcaccaggattggctgaacggcaaagagtacaagtgcaaggtgtccaacaaggccctgcctgctcctatcgagaaaaccatcagcaaggccaagggccagcctagggaaccccaggtttacacactgcctccaagccgcgaggaaatgaccaagaaccaggtgtccctgacctgcctcgtgaagggcttctacccttccgatatcgccgtggaatgggagagcaatggccagcctgagaacaactacaagacaacccctcctgtgctggacagcgacggctcattcttcctgtacagcaagctgactgtggataagtcccggtggcagcagggcaacgtgttcagctgttctgtgatgcacgaagccctgcacaaccactacacccagaaaagcctgtctctgagccccggcaagtgataa

SEQ ID NO: 1268 - DNA, 687 bp, synthetic construct; identical to SEQ ID NO: 1267
  source 1..687: mol_type = other DNA

SEQ ID NO: 1269 - DNA, 687 bp, synthetic construct
  source 1..687: mol_type = other DNA
gataagacccacacctgtcctccatgtccagctccagaactgctcggcggaccttccgtgttcctgtttcctccaaagcctaaggacaccctgatgatcagcagaacccctgaagtgacctgcgtggtggtggatgtgtctcacgaggacccagaagtgaagttcaattggtacgtggacggcgtggaagtgcacaacgccaagaccaagcctagagaggaacagtacaacagcacctacagagtggtgtccgtgctgacagtgctgcaccaggattggctgaacggcaaagagtacaagtgcaaggtgtccaacaaggccctgcctgctcctatcgagaaaaccatcagcaaggccaagggccagcctagggaaccccaggtttacacactgcctccaagccgcgaggaaatgaccaagaaccaggtgtccctgacctgcctcgtgaagggcttctacccttccgatatcgccgtggaatgggagagcaatggccagcctgagaacaactacaagacaacccctcctgtgctggacagcgacggctcattcttcctgtacagcaagctgaccgtggacaagtccagatggcagcagggcaacgtgttcagctgtagcgtgctgcacgaagccctgcacagccactacacccagaaaagcctgtctctgagccccggcaaatgataa

SEQ ID NO: 1270 - DNA, 687 bp, synthetic construct
  source 1..687: mol_type = other DNA
gataagacccacacctgtcctccatgtccagctccagaactgctcggcggaccttccgtgttcctgtttcctccaaagcctaaggacaccctgatgatcagcagaacccctgaagtgacctgcgtggtggtggatgtgtctcacgaggacccagaagtgaagttcaattggtacgtggacggcgtggaagtgcacaacgccaagaccaagcctagagaggaacagtacaacagcacctacagagtggtgtccgtgctgacagtgctgcaccaggattggctgaacggcaaagagtacaagtgcaaggtgtccaacaaggccctgcctgctcctatcgagaaaaccatcagcaaggccaagggccagcctagggaaccccaggtttacacactgcctccaagccgcgacgaactgaccaagaaccaggtgtccctgacctgcctcgtgaagggcttctacccttccgatatcgccgtggaatgggagagcaatggccagcctgagaacaactacaagacaacccctcctgtgctggacagcgacggctcattcttcctgtacagcaagctgactgtggataagtcccggtggcagcagggcaacgtgttcagctgttctgtgatgcacgaagccctgcacaaccactacacccagaaaagcctgtctctgagccccggcaagtgataa

SEQ ID NO: 1271 - DNA, 687 bp, synthetic construct
  source 1..687: mol_type = other DNA
gataagacccacacctgtcctccatgtccagctccagaactgctcggcggaccttccgtgttcctgtttcctccaaagcctaaggacaccctgatgatcagcagaacccctgaagtgacctgcgtggtggtggatgtgtctcacgaggacccagaagtgaagttcaattggtacgtggacggcgtggaagtgcacaacgccaagaccaagcctagagaggaacagtacaacagcacctacagagtggtgtccgtgctgacagtgctgcaccaggattggctgaacggcaaagagtacaagtgcaaggtgtccaacaaggccctgcctgctcctatcgagaaaaccatcagcaaggccaagggccagcctagggaaccccaggtttacacactgcctccaagccgcgacgaactgaccaagaaccaggtgtccctgacctgcctcgtgaagggcttctacccttccgatatcgccgtggaatgggagagcaatggccagcctgagaacaactacaagacaacccctcctgtgctggacagcgacggctcattcttcctgtacagcaagctgaccgtggacaagtccagatggcagcagggcaacgtgttcagctgtagcgtgctgcacgaagccctgcacagccactacacccagaaaagcctgtctctgagccccggcaaatgataa

SEQ ID NO: 1272 - DNA, 321 bp, synthetic construct; identical to SEQ ID NO: 95
  source 1..321: mol_type = other DNA

SEQ ID NO: 1273 - DNA, 687 bp, synthetic construct; identical to SEQ ID NO: 1267
  source 1..687: mol_type = other DNA

SEQ ID NO: 1274 - DNA, 687 bp, synthetic construct; identical to SEQ ID NO: 1267
  source 1..687: mol_type = other DNA

SEQ ID NO: 1275 - DNA, 687 bp, synthetic construct; identical to SEQ ID NO: 1269
  source 1..687: mol_type = other DNA

SEQ ID NO: 1276 - DNA, 687 bp, synthetic construct; identical to SEQ ID NO: 1270
  source 1..687: mol_type = other DNA

SEQ ID NO: 1277 - DNA, 687 bp, synthetic construct; identical to SEQ ID NO: 1271
  source 1..687: mol_type = other DNA

SEQ ID NO: 1278 - DNA, 294 bp, synthetic construct; identical to SEQ ID NO: 89
  source 1..294: mol_type = other DNA

SEQ ID NO: 1279 - DNA, 294 bp, synthetic construct; identical to SEQ ID NO: 89
  source 1..294: mol_type = other DNA

SEQ ID NO: 1280 - DNA, 702 bp, synthetic construct
  source 1..702: mol_type = other DNA
gaacccaagagctgcgacaagacccacacctgtcctccatgtcctgctccagaactgctcggcggaccttccgtgttcctgtttcctccaaagcctaaggacaccctgatgatcagcagaacccctgaagtgacctgcgtggtggtggatgtgtctcacgaggacccagaagtgaagttcaattggtacgtggacggcgtggaagtgcacaacgccaagaccaagcctagagaggaacagtacaacagcacctacagagtggtgtccgtgctgacagtgctgcaccaggattggctgaacggcaaagagtacaagtgcaaggtgtccaacaaggccctgcctgctcctatcgagaaaaccatcagcaaggccaagggccagcctagggaaccccaggtttacacactgcctccaagccgcgaggaaatgaccaagaaccaggtgtccctgacctgcctcgtgaagggcttctacccttccgatatcgccgtggaatgggagagcaatggccagcctgagaacaactacaagacaacccctcctgtgctggacagcgacggctcattcttcctgtacagcaagctgactgtggataagtcccggtggcagcagggcaacgtgttcagctgttctgtgatgcacgaagccctgcacaaccactacacccagaaaagcctgtctctgagccccggcaagtgataa

SEQ ID NO: 1281 - DNA, 702 bp, synthetic construct
  source 1..702: mol_type = other DNA
gaacccaagagctgcgacaagacccacacctgtcctccatgtcctgctccagaactgctggccggaccttccgtgttcctgtttcctccaaagcctaaggacaccctgatgatcagcagaacccctgaagtgacctgcgtggtggtggatgtgtctcacgaggaccctgaagtgaagttcaattggtacgtggacggcgtggaagtgcacaacgccaagaccaagcctagagaggaacagtacaacagcacctacagagtggtgtccgtgctgaccgtgctgcaccaggattggctgaacggcaaagagtacaagtgcaaggtgtccaacaaggccctgcctgcccctgaggaaaagaccatcagcaaggccaagggccagcctagggaaccccaggtttacacactgcctccaagccgcgaggaaatgaccaagaaccaggtgtccctgacctgcctcgtgaagggcttctacccttccgatatcgccgtggaatgggagagcaatggccagcctgagaacaactacaagacaacccctcctgtgctggacagcgacggctcattcttcctgtacagcaagctgaccgtggacaagtccagatggcagcagggcaacgtgttcagctgtagcgtgctgcacgaagccctgcacagccactacacccagaaaagcctgtctctgagccccggcaaatgataa

SEQ ID NO: 1282 - DNA, 702 bp, synthetic construct; identical to SEQ ID NO: 1280
  source 1..702: mol_type = other DNA

SEQ ID NO: 1283 - DNA, 702 bp, synthetic construct
  source 1..702: mol_type = other DNA
gaacccaagagctgcgacaagacccacacctgtcctccatgtcctgctccagaactgctcggcggaccttccgtgttcctgtttcctccaaagcctaaggacaccctgatgatcagcagaacccctgaagtgacctgcgtggtggtggatgtgtctcacgaggacccagaagtgaagttcaattggtacgtggacggcgtggaagtgcacaacgccaagaccaagcctagagaggaacagtacaacagcacctacagagtggtgtccgtgctgacagtgctgcaccaggattggctgaacggcaaagagtacaagtgcaaggtgtccaacaaggccctgcctgctcctatcgagaaaaccatcagcaaggccaagggccagcctagggaaccccaggtttacacactgcctccaagccgcgaggaaatgaccaagaaccaggtgtccctgacctgcctcgtgaagggcttctacccttccgatatcgccgtggaatgggagagcaatggccagcctgagaacaactacaagacaacccctcctgtgctggacagcgacggctcattcttcctgtacagcaagctgaccgtggacaagtccagatggcagcagggcaacgtgttcagctgtagcgtgctgcacgaagccctgcacagccactacacccagaaaagcctgtctctgagccccggcaaatgataa

SEQ ID NO: 1284 - DNA, 702 bp, synthetic construct
  source 1..702: mol_type = other DNA
gaacccaagagctgcgacaagacccacacctgtcctccatgtcctgctccagaactgctggccggaccttccgtgttcctgtttcctccaaagcctaaggacaccctgatgatcagcagaacccctgaagtgacctgcgtggtggtggatgtgtctcacgaggaccctgaagtgaagttcaattggtacgtggacggcgtggaagtgcacaacgccaagaccaagcctagagaggaacagtacaacagcacctacagagtggtgtccgtgctgaccgtgctgcaccaggattggctgaacggcaaagagtacaagtgcaaggtgtccaacaaggccctgcctctgcctgaggaaaagaccatcagcaaggccaagggccagcctagggaaccccaggtttacacactgcctccaagccgcgaggaaatgaccaagaaccaggtgtccctgacctgcctcgtgaagggcttctacccttccgatatcgccgtggaatgggagagcaatggccagcctgagaacaactacaagacaacccctcctgtgctggacagcgacggctcattcttcctgtacagcaagctgaccgtggacaagtccagatggcagcagggcaacgtgttcagctgtagcgtgctgcacgaagccctgcacagccactacacccagaaaagcctgtctctgagccccggcaaatgataa

SEQ ID NO: 1285 - DNA, 702 bp, synthetic construct; identical to SEQ ID NO: 1281
  source 1..702: mol_type = other DNA

SEQ ID NO: 1286 - DNA, 702 bp, synthetic construct
  source 1..702: mol_type = other DNA
gaacccaagagctgcgacaagacccacacctgtcctccatgtcctgctccagaactgctcggcggaccttccgtgttcctgtttcctccaaagcctaaggacaccctgatgatcagcagaacccctgaagtgacctgcgtggtggtggatgtgtctcacgaggacccagaagtgaagttcaattggtacgtggacggcgtggaagtgcacaacgccaagaccaagcctagagaggaacagtacaacagcacctacagagtggtgtccgtgctgacagtgctgcaccaggattggctgaacggcaaagagtacaagtgcaaggtgtccaacaaggccctgcctgctcctatcgagaaaaccatcagcaaggccaagggccagcctagggaaccccaggtttacacactgcctccaagccgcgacgaactgaccaagaaccaggtgtccctgacctgcctcgtgaagggcttctacccttccgatatcgccgtggaatgggagagcaatggccagcctgagaacaactacaagacaacccctcctgtgctggacagcgacggctcattcttcctgtacagcaagctgactgtggataagtcccggtggcagcagggcaacgtgttcagctgttctgtgatgcacgaagccctgcacaaccactacacccagaaaagcctgtctctgagccccggcaagtgataa

SEQ ID NO: 1287 - DNA, 702 bp, synthetic construct
  source 1..702: mol_type = other DNA
gaacccaagagctgcgacaagacccacacctgtcctccatgtcctgctccagaactgctcggcggaccttccgtgttcctgtttcctccaaagcctaaggacaccctgatgatcagcagaacccctgaagtgacctgcgtggtggtggatgtgtctcacgaggacccagaagtgaagttcaattggtacgtggacggcgtggaagtgcacaacgccaagaccaagcctagagaggaacagtacaacagcacctacagagtggtgtccgtgctgacagtgctgcaccaggattggctgaacggcaaagagtacaagtgcaaggtgtccaacaaggccctgcctgctcctatcgagaaaaccatcagcaaggccaagggccagcctagggaaccccaggtttacacactgcctccaagccgcgacgaactgaccaagaaccaggtgtccctgacctgcctcgtgaagggcttctacccttccgatatcgccgtggaatgggagagcaatggccagcctgagaacaactacaagacaacccctcctgtgctggacagcgacggctcattcttcctgtacagcaagctgaccgtggacaagtccagatggcagcagggcaacgtgttcagctgtagcgtgctgcacgaagccctgcacagccactacacccagaaaagcctgtctctgagccccggcaaatgataa

SEQ ID NO: 1288 - DNA, 702 bp, synthetic construct
  source 1..702: mol_type = other DNA
gaacccaagagctgcgacaagacccacacctgtcctccatgtcctgctccagaactgctggccggaccttccgtgttcctgtttcctccaaagcctaaggacaccctgatgatcagcagaacccctgaagtgacctgcgtggtggtggatgtgtctcacgaggaccctgaagtgaagttcaattggtacgtggacggcgtggaagtgcacaacgccaagaccaagcctagagaggaacagtacaacagcacctacagagtggtgtccgtgctgaccgtgctgcaccaggattggctgaacggcaaagagtacaagtgcaaggtgtccaacaaggccctgcctctgcctgaggaaaagaccatcagcaaggccaagggccagcctagggaaccccaggtttacacactgcctccaagccgcgacgaactgaccaagaaccaggtgtccctgacctgcctcgtgaagggcttctacccttccgatatcgccgtggaatgggagagcaatggccagcctgagaacaactacaagacaacccctcctgtgctggacagcgacggctcattcttcctgtacagcaagctgaccgtggacaagtccagatggcagcagggcaacgtgttcagctgtagcgtgctgcacgaagccctgcacagccactacacccagaaaagcctgtctctgagccccggcaaatgataa

SEQ ID NO: 1289 - DNA, 702 bp, synthetic construct
  source 1..702: mol_type = other DNA
gaacccaagagctgcgacaagacccacacctgtcctccatgtcctgctccagaactgctggccggaccttccgtgttcctgtttcctccaaagcctaaggacaccctgatgatcagcagaacccctgaagtgacctgcgtggtggtggatgtgtctcacgaggaccctgaagtgaagttcaattggtacgtggacggcgtggaagtgcacaacgccaagaccaagcctagagaggaacagtacaacagcacctacagagtggtgtccgtgctgaccgtgctgcaccaggattggctgaacggcaaagagtacaagtgcaaggtgtccaacaaggccctgcctgcccctgaggaaaagaccatcagcaaggccaagggccagcctagggaaccccaggtttacacactgcctccaagccgcgacgaactgaccaagaaccaggtgtccctgacctgcctcgtgaagggcttctacccttccgatatcgccgtggaatgggagagcaatggccagcctgagaacaactacaagacaacccctcctgtgctggacagcgacggctcattcttcctgtacagcaagctgaccgtggacaagtccagatggcagcagggcaacgtgttcagctgtagcgtgctgcacgaagccctgcacagccactacacccagaaaagcctgtctctgagccccggcaaatgataa

SEQ ID NO: 1290 - DNA, 708 bp, synthetic construct
  source 1..708: mol_type = other DNA
atggattggatttggagaatcctgttcctcgtgggcgccgctaccggagcccactccgaagttgtgctgacacagagccccgccatcctgagtgttagccctggcgatagagtgatcctgagctgcagagcctctcagggcctcgattcttctcacctggcctggtacagattcaagcggggacagatccccacactggtcatcttcggcaccagcaacagagccagaggcacccctgatagattttccggctctggcagcggagccgacttcaccctgacaatcagcagagtggaacccgaggacttcgccacctactactgccagagatacggcggcacccctatcacatttggcggcggaaccacactggacaagaaacgtacggtggccgctcctagcgtgttcatctttccacctagcgacagaaagctgaagtctggcacagcctctgtcgtgtgcctgctcaacaacttctaccccagagaagccaaggtgcagtggaaggtggacaacgccctgcagagcggcaatagccaagagagcgtgaccgagcaggacagcaaggactctacctacagcctgagcagcacactgaccctgagcaaggccgactacgagaagcacaaagtgtacgcctgcgaagtgacccaccagggcctttctagccctgtgaccaagagcttcaaccggggcgagtgctgataa

SEQ ID NO: 1291 - DNA, 702 bp, synthetic construct
  source 1..702: mol_type = other DNA
gaacccaagagctgcgacaagacccacacctgtcctccatgtcctgctccagaactgctggccggaccttccgtgttcctgtttcctccaaagcctaaggacaccctgatgatcagcagaacccctgaagtgacctgcgtggtggtggatgtgtctcacgaggaccctgaagtgaagttcaattggtacgtggacggcgtggaagtgcacaacgccaagaccaagcctagagaggaacagtacaacagcacctacagagtggtgtccgtgctgaccgtgctgcaccaggattggctgaacggcaaagagtacaagtgcaaggtgtccaacaaggccctgcctgcccctgaggaaaagaccatcagcaaggccaagggccagcctcgcgaacctcaagtctgtacactgcctcctagccgcgaggaaatgaccaagaaccaggtgtccctgagctgcgccgtgaagggcttttacccttccgatatcgccgtggaatgggagagcaatggccagcctgagaacaactacaagacaacccctcctgtgctggacagcgacggctcattcttcctggtgtccaagctgacagtggacaagagcagatggcagcagggcaacgtgttcagctgcagcgtgctgcatgaagccctgcacagccactacacccagaagtccctgtctctgagccccggcaagtgataa

SEQ ID NO: 1292 - DNA, 702 bp, synthetic construct
  source 1..702: mol_type = other DNA
gaacccaagagctgcgacaagacccacacctgtcctccatgtcctgctccagaactgctggccggaccttccgtgttcctgtttcctccaaagcctaaggacaccctgatgatcagcagaacccctgaagtgacctgcgtggtggtggatgtgtctcacgaggaccctgaagtgaagttcaattggtacgtggacggcgtggaagtgcacaacgccaagaccaagcctagagaggaacagtacaacagcacctacagagtggtgtccgtgctgaccgtgctgcaccaggattggctgaacggcaaagagtacaagtgcaaggtgtccaacaaggccctgcctgcccctgaggaaaagaccatcagcaaggccaagggccagcctagggaaccccaggtttacaccctgcctccatgccgcgaggaaatgaccaagaaccaggtgtccctgtggtgcctggtcaagggcttctacccttccgatatcgccgtggaatgggagagcaatggccagcctgagaacaactacaagacaacccctcctgtgctggacagcgacggctcattcttcctgtacagcaagctgacagtggacaagagcagatggcagcagggcaacgtgttcagctgcagcgtgctgcatgaagccctgcacagccactacacccagaagtccctgtctctgagccccggcaagtgataa

SEQ ID NO: 1293 - DNA, 702 bp, synthetic construct
  source 1..702: mol_type = other DNA
gaacccaagagctgcgacaagacccacacctgtcctccatgtcctgctccagaactgctcggcggaccttccgtgttcctgtttcctccaaagcctaaggacaccctgatgatcagcagaacccctgaagtgacctgcgtggtggtggatgtgtctcacgaggacccagaagtgaagttcaattggtacgtggacggcgtggaagtgcacaacgccaagaccaagcctagagaggaacagtacaacagcacctacagagtggtgtccgtgctgacagtgctgcaccaggattggctgaacggcaaagagtacaagtgcaaggtgtccaacaaggccctgcctgctcctatcgagaaaaccatcagcaaggccaagggccagcctcgcgaacctcaagtctgtacactgcctcctagccgcgaggaaatgaccaagaaccaggtgtccctgagctgcgccgtgaagggcttttacccttccgatatcgccgtggaatgggagagcaatggccagcctgagaacaactacaagacaacccctcctgtgctggacagcgacggctcattcttcctggtgtccaagctgacagtggacaagagcagatggcagcagggcaacgtgttcagctgcagcgtgctgcatgaagccctgcacagccactacacccagaagtccctgtctctgagccccggcaagtgataa

SEQ ID NO: 1294 - DNA, 702 bp, synthetic construct
  source 1..702: mol_type = other DNA
gaacccaagagctgcgacaagacccacacctgtcctccatgtcctgctccagaactgctggccggaccttccgtgttcctgtttcctccaaagcctaaggacaccctgatgatcagcagaacccctgaagtgacctgcgtggtggtggatgtgtctcacgaggaccctgaagtgaagttcaattggtacgtggacggcgtggaagtgcacaacgccaagaccaagcctagagaggaacagtacaacagcacctacagagtggtgtccgtgctgaccgtgctgcaccaggattggctgaacggcaaagagtacaagtgcaaggtgtccaacaaggccctgcctctgcctgaggaaaagaccatcagcaaggccaagggccagcctcgcgaacctcaagtctgtacactgcctcctagccgcgaggaaatgaccaagaaccaggtgtccctgagctgcgccgtgaagggcttttacccttccgatatcgccgtggaatgggagagcaatggccagcctgagaacaactacaagacaacccctcctgtgctggacagcgacggctcattcttcctggtgtccaagctgacagtggacaagagcagatggcagcagggcaacgtgttcagctgcagcgtgctgcatgaagccctgcacagccactacacccagaagtccctgtctctgagccccggcaagtgataa

SEQ ID NO: 1295 - DNA, 702 bp, synthetic construct; identical to SEQ ID NO: 1291
  source 1..702: mol_type = other DNA

SEQ ID NO: 1296 - DNA, 702 bp, synthetic construct
  source 1..702: mol_type = other DNA
gaacccaagagctgcgacaagacccacacctgtcctccatgtcctgctccagaactgctcggcggaccttccgtgttcctgtttcctccaaagcctaaggacaccctgatgatcagcagaacccctgaagtgacctgcgtggtggtggatgtgtctcacgaggacccagaagtgaagttcaattggtacgtggacggcgtggaagtgcacaacgccaagaccaagcctagagaggaacagtacaacagcacctacagagtggtgtccgtgctgacagtgctgcaccaggattggctgaacggcaaagagtacaagtgcaaggtgtccaacaaggccctgcctgctcctatcgagaaaaccatcagcaaggccaagggccagcctagggaaccccaggtttacaccctgcctccatgccgcgaggaaatgaccaagaaccaggtgtccctgtggtgcctggtcaagggcttctacccttccgatatcgccgtggaatgggagagcaatggccagcctgagaacaactacaagacaacccctcctgtgctggacagcgacggctcattcttcctgtacagcaagctgacagtggacaagagcagatggcagcagggcaacgtgttcagctgcagcgtgctgcatgaagccctgcacagccactacacccagaagtccctgtctctgagccccggcaagtgataa

SEQ ID NO: 1297 - DNA, 702 bp, synthetic construct
  source 1..702: mol_type = other DNA
gaacccaagagctgcgacaagacccacacctgtcctccatgtcctgctccagaactgctggccggaccttccgtgttcctgtttcctccaaagcctaaggacaccctgatgatcagcagaacccctgaagtgacctgcgtggtggtggatgtgtctcacgaggaccctgaagtgaagttcaattggtacgtggacggcgtggaagtgcacaacgccaagaccaagcctagagaggaacagtacaacagcacctacagagtggtgtccgtgctgaccgtgctgcaccaggattggctgaacggcaaagagtacaagtgcaaggtgtccaacaaggccctgcctctgcctgaggaaaagaccatcagcaaggccaagggccagcctagggaaccccaggtttacaccctgcctccatgccgcgaggaaatgaccaagaaccaggtgtccctgtggtgcctggtcaagggcttctacccttccgatatcgccgtggaatgggagagcaatggccagcctgagaacaactacaagacaacccctcctgtgctggacagcgacggctcattcttcctgtacagcaagctgacagtggacaagagcagatggcagcagggcaacgtgttcagctgcagcgtgctgcatgaagccctgcacagccactacacccagaagtccctgtctctgagccccggcaagtgataa

SEQ ID NO: 1298 - DNA, 702 bp, synthetic construct; identical to SEQ ID NO: 1292
  source 1..702: mol_type = other DNA

SEQ ID NO: 1299 - DNA, 702 bp, synthetic construct
  source 1..702: mol_type = other DNA
gaacccaagagctgcgacaagacccacacctgtcctccatgtcctgctccagaactgctcggcggaccttccgtgttcctgtttcctccaaagcctaaggacaccctgatgatcagcagaacccctgaagtgacctgcgtggtggtggatgtgtctcacgaggacccagaagtgaagttcaattggtacgtggacggcgtggaagtgcacaacgccaagaccaagcctagagaggaacagtacaacagcacctacagagtggtgtccgtgctgacagtgctgcaccaggattggctgaacggcaaagagtacaagtgcaaggtgtccaacaaggccctgcctgctcctatcgagaaaaccatcagcaaggccaagggccagcctcgcgaacctcaagtctgtacactgcctcctagccgcgacgaactgaccaagaaccaggtgtccctgagctgcgccgtgaagggcttttacccttccgatatcgccgtggaatgggagagcaatggccagcctgagaacaactacaagacaacccctcctgtgctggacagcgacggctcattcttcctggtgtccaagctgacagtggacaagagcagatggcagcagggcaacgtgttcagctgcagcgtgctgcatgaagccctgcacagccactacacccagaagtccctgtctctgagccccggcaagtgataa

SEQ ID NO: 1300 - DNA, 702 bp, synthetic construct
  source 1..702: mol_type = other DNA
gaacccaagagctgcgacaagacccacacctgtcctccatgtcctgctccagaactgctggccggaccttccgtgttcctgtttcctccaaagcctaaggacaccctgatgatcagcagaacccctgaagtgacctgcgtggtggtggatgtgtctcacgaggaccctgaagtgaagttcaattggtacgtggacggcgtggaagtgcacaacgccaagaccaagcctagagaggaacagtacaacagcacctacagagtggtgtccgtgctgaccgtgctgcaccaggattggctgaacggcaaagagtacaagtgcaaggtgtccaacaaggccctgcctctgcctgaggaaaagaccatcagcaaggccaagggccagcctcgcgaacctcaagtctgtacactgcctcctagccgcgacgaactgaccaagaaccaggtgtccctgagctgcgccgtgaagggcttttacccttccgatatcgccgtggaatgggagagcaatggccagcctgagaacaactacaagacaacccctcctgtgctggacagcgacggctcattcttcctggtgtccaagctgacagtggacaagagcagatggcagcagggcaacgtgttcagctgcagcgtgctgcatgaagccctgcacagccactacacccagaagtccctgtctctgagccccggcaagtgataa

SEQ ID NO: 1301 - DNA, 702 bp, synthetic construct
  source 1..702: mol_type = other DNA
gaacccaagagctgcgacaagacccacacctgtcctccatgtcctgctccagaactgctggccggaccttccgtgttcctgtttcctccaaagcctaaggacaccctgatgatcagcagaacccctgaagtgacctgcgtggtggtggatgtgtctcacgaggaccctgaagtgaagttcaattggtacgtggacggcgtggaagtgcacaacgccaagaccaagcctagagaggaacagtacaacagcacctacagagtggtgtccgtgctgaccgtgctgcaccaggattggctgaacggcaaagagtacaagtgcaaggtgtccaacaaggccctgcctgcccctgaggaaaagaccatcagcaaggccaagggccagcctcgcgaacctcaagtctgtacactgcctcctagccgcgacgaactgaccaagaaccaggtgtccctgagctgcgccgtgaagggcttttacccttccgatatcgccgtggaatgggagagcaatggccagcctgagaacaactacaagacaacccctcctgtgctggacagcgacggctcattcttcctggtgtccaagctgacagtggacaagagcagatggcagcagggcaacgtgttcagctgcagcgtgctgcatgaagccctgcacagccactacacccagaagtccctgtctctgagccccggcaagtgataa

SEQ ID NO: 1302 - DNA, 702 bp, synthetic construct
  source 1..702: mol_type = other DNA
gaacccaagagctgcgacaagacccacacctgtcctccatgtcctgctccagaactgctcggcggaccttccgtgttcctgtttcctccaaagcctaaggacaccctgatgatcagcagaacccctgaagtgacctgcgtggtggtggatgtgtctcacgaggacccagaagtgaagttcaattggtacgtggacggcgtggaagtgcacaacgccaagaccaagcctagagaggaacagtacaacagcacctacagagtggtgtccgtgctgacagtgctgcaccaggattggctgaacggcaaagagtacaagtgcaaggtgtccaacaaggccctgcctgctcctatcgagaaaaccatcagcaaggccaagggccagcctagggaaccccaggtttacaccctgcctccatgccgcgacgaactgaccaagaaccaggtgtccctgtggtgcctggtcaagggcttctacccttccgatatcgccgtggaatgggagagcaatggccagcctgagaacaactacaagacaacccctcctgtgctggacagcgacggctcattcttcctgtacagcaagctgacagtggacaagagcagatggcagcagggcaacgtgttcagctgcagcgtgctgcatgaagccctgcacagccactacacccagaagtccctgtctctgagccccggcaagtgataa

SEQ ID NO: 1303 - DNA, 702 bp, synthetic construct
  source 1..702: mol_type = other DNA
gaacccaagagctgcgacaagacccacacctgtcctccatgtcctgctccagaactgctggccggaccttccgtgttcctgtttcctccaaagcctaaggacaccctgatgatcagcagaacccctgaagtgacctgcgtggtggtggatgtgtctcacgaggaccctgaagtgaagttcaattggtacgtggacggcgtggaagtgcacaacgccaagaccaagcctagagaggaacagtacaacagcacctacagagtggtgtccgtgctgaccgtgctgcaccaggattggctgaacggcaaagagtacaagtgcaaggtgtccaacaaggccctgcctctgcctgaggaaaagaccatcagcaaggccaagggccagcctagggaaccccaggtttacaccctgcctccatgccgcgacgaactgaccaagaaccaggtgtccctgtggtgcctggtcaagggcttctacccttccgatatcgccgtggaatgggagagcaatggccagcctgagaacaactacaagacaacccctcctgtgctggacagcgacggctcattcttcctgtacagcaagctgacagtggacaagagcagatggcagcagggcaacgtgttcagctgcagcgtgctgcatgaagccctgcacagccactacacccagaagtccctgtctctgagccccggcaagtgataa

SEQ ID NO: 1304 - DNA, 702 bp, synthetic construct
  source 1..702: mol_type = other DNA
gaacccaagagctgcgacaagacccacacctgtcctccatgtcctgctccagaactgctggccggaccttccgtgttcctgtttcctccaaagcctaaggacaccctgatgatcagcagaacccctgaagtgacctgcgtggtggtggatgtgtctcacgaggaccctgaagtgaagttcaattggtacgtggacggcgtggaagtgcacaacgccaagaccaagcctagagaggaacagtacaacagcacctacagagtggtgtccgtgctgaccgtgctgcaccaggattggctgaacggcaaagagtacaagtgcaaggtgtccaacaaggccctgcctgcccctgaggaaaagaccatcagcaaggccaagggccagcctagggaaccccaggtttacaccctgcctccatgccgcgacgaactgaccaagaaccaggtgtccctgtggtgcctggtcaagggcttctacccttccgatatcgccgtggaatgggagagcaatggccagcctgagaacaactacaagacaacccctcctgtgctggacagcgacggctcattcttcctgtacagcaagctgacagtggacaagagcagatggcagcagggcaacgtgttcagctgcagcgtgctgcatgaagccctgcacagccactacacccagaagtccctgtctctgagccccggcaagtgataa

SEQ ID NO: 1305 - DNA, 1476 bp, synthetic construct; identical to SEQ ID NO: 170
  source 1..1476: mol_type = other DNA

SEQ ID NO: 1306 - RNA, 1476 nt, synthetic construct; identical to SEQ ID NO: 218
  source 1..1476: mol_type = other RNA

SEQ ID NO: 1307 - protein, 490 aa, synthetic construct
MDWIWRILFLVGAATGAHSQVHLTQSGPEVRKPGTSVKVSCKAPGNTLKTYDLHWVRSVPGQGLQWMGWISHEGDKKVIVERFKAKVTIDWDRSTNTAYLQLSGLTSGDTAVYYCAKGSKHRLRDYALYDDDGALNWAVDVDYLSNLEFWGQGTAVTVSSASTKGPSVFPLAPSSKSTSGGTAALGCLVKDYFPEPVTVSWNSGALTSGVHTFPAVLQSSGLYSLSSVVTVPSSSLGTQTYICNVNHKPSNTKVDKRVEPKSCDKTHTCPPCPAPELLGGPSVFLFPPKPKDTLMISRTPEVTCVVVDVSHEDPEVKFNWYVDGVEVHNAKTKPREEQYNSTYRVVSVLTVLHQDWLNGKEYKCKVSNKALPAPIEKTISKAKGQPREPQVYTLPPSREEMTKNQVSLTCLVKGFYPSDIAVEWESNGQPENNYKTTPPVLDSDGSFFLYSKLTVDKSRWQQGNVFSCSVMHEALHNHYTQKSLSLSPGK

SEQ ID NO: 1308 - DNA, 1476 bp, synthetic construct; identical to SEQ ID NO: 171
  source 1..1476: mol_type = other DNA

SEQ ID NO: 1309 - RNA, 1476 nt, synthetic construct; identical to SEQ ID NO: 219
  source 1..1476: mol_type = other RNA

SEQ ID NO: 1310 - protein, 490 aa, synthetic construct
MDWIWRILFLVGAATGAHSQVHLTQSGPEVRKPGTSVKVSCKAPGNTLKTYDLHWVRSVPGQGLQWMGWISHEGDKKVIVERFKAKVTIDWDRSTNTAYLQLSGLTSGDTAVYYCAKGSKHRLRDYALYDDDGALNWAVDVDYLSNLEFWGQGTAVTVSSASTKGPSVFPLAPSSKSTSGGTAALGCLVKDYFPEPVTVSWNSGALTSGVHTFPAVLQSSGLYSLSSVVTVPSSSLGTQTYICNVNHKPSNTKVDKRVEPKSCDKTHTCPPCPAPELLGGPSVFLFPPKPKDTLMISRTPEVTCVVVDVSHEDPEVKFNWYVDGVEVHNAKTKPREEQYNSTYRVVSVLTVLHQDWLNGKEYKCKVSNKALPAPIEKTISKAKGQPREPQVYTLPPSREEMTKNQVSLTCLVKGFYPSDIAVEWESNGQPENNYKTTPPVLDSDGSFFLYSKLTVDKSRWQQGNVFSCSVLHEALHSHYTQKSLSLSPGK

SEQ ID NO: 1311 - DNA, 720 bp, synthetic construct; identical to SEQ ID NO: 842
  source 1..720: mol_type = other DNA

SEQ ID NO: 1312 - RNA, 720 nt, synthetic construct; identical to SEQ ID NO: 843
  source 1..720: mol_type = other RNA

SEQ ID NO: 1313 - protein, 238 aa, synthetic construct
MDWIWRILFLVGAATGAHSDFVLTQSPHSLSVTPGESASISCKSSHSLIHGDRNNYLAWYVQKPGRSPQLLIYLASSRASGVPDRFSGSGSDKDFTLKISRVETEDVGTYYCMQGRESPWTFGQGTKVDIKRTVAAPSVFIFPPSDEQLKSGTASVVCLLNNFYPREAKVQWKVDNALQSGNSQESVTEQDSKDSTYSLSSTLTLSKADYEKHKVYACEVTHQGLSSPVTKSFNRGEC

SEQ ID NO: 1314 - DNA, 1476 bp, synthetic construct; identical to SEQ ID NO: 173
  source 1..1476: mol_type = other DNA

SEQ ID NO: 1315 - RNA, 1476 nt, synthetic construct; identical to SEQ ID NO: 221
  source 1..1476: mol_type = other RNA

SEQ ID NO: 1316 - protein, 490 aa, synthetic construct
MDWIWRILFLVGAATGAHSQVHLTQSGPEVRKPGTSVKVSCKAPGNTLKTYDLHWVRSVPGQGLQWMGWISHEGDKKVIVERFKAKVTIDWDRSTNTAYLQLSGLTSGDTAVYYCAKGSKHRLRDYALYDDDGALNWAVDVDYLSNLEFWGQGTAVTVSSASTKGPSVFPLAPSSKSTSGGTAALGCLVKDYFPEPVTVSWNSGALTSGVHTFPAVLQSSGLYSLSSVVTVPSSSLGTQTYICNVNHKPSNTKVDKRVEPKSCDKTHTCPPCPAPELLGGPSVFLFPPKPKDTLMISRTPEVTCVVVDVSHEDPEVKFNWYVDGVEVHNAKTKPREEQYNSTYRVVSVLTVLHQDWLNGKEYKCKVSNKALPAPIEKTISKAKGQPREPQVYTLPPCREEMTKNQVSLWCLVKGFYPSDIAVEWESNGQPENNYKTTPPVLDSDGSFFLYSKLTVDKSRWQQGNVFSCSVLHEALHSHYTQKSLSLSPGK

SEQ ID NO: 1317 - DNA, 1488 bp, synthetic construct; identical to SEQ ID NO: 267
  source 1..1488: mol_type = other DNA

SEQ ID NO: 1318 - RNA, 1488 nt, synthetic construct; identical to SEQ ID NO: 315
  source 1..1488: mol_type = other RNA

SEQ ID NO: 1319 - protein, 494 aa, synthetic construct
MDWIWRILFLVGAATGAHSQVHLTQSGPEVRKPGTSVKVSCKAPGNTLKTYDLHWVRSVPGQGLQWMGWISHEGDKKVIVERFKAKVTIDWDRSTNTAYLQLSGLTSGDTAVYYCAKGSKHRLRDYALYDDDGALNWAVDVDYLSNLEFWGQGTAVTVSSASVAAPSVFIFPPSDEELKSGTASVVCLLNNFYPREAKVQWKVDNALQSGNSQESVTEQDSKDSTYSLSSTLTLSKADYEKHKVYACEVTHQGLSSPVTKSFNRGECDKTHTCPPCPAPELLGGPSVFLFPPKPKDTLMISRTPEVTCVVVDVSHEDPEVKFNWYVDGVEVHNAKTKPREEQYNSTYRVVSVLTVLHQDWLNGKEYKCKVSNKALPAPIEKTISKAKGQPREPQVYTLPPSREEMTKNQVSLTCLVKGFYPSDIAVEWESNGQPENNYKTTPPVLDSDGSFFLYSKLTVDKSRWQQGNVFSCSVLHEALHSHYTQKSLSLSPGK

SEQ ID NO: 1320 - DNA, 714 bp, synthetic construct; identical to SEQ ID NO: 844
  source 1..714: mol_type = other DNA

SEQ ID NO: 1321 - RNA, 714 nt, synthetic construct; identical to SEQ ID NO: 846
  source 1..714: mol_type = other RNA

SEQ ID NO: 1322 - protein, 236 aa, synthetic construct
MDWIWRILFLVGAATGAHSDFVLTQSPHSLSVTPGESASISCKSSHSLIHGDRNNYLAWYVQKPGRSPQLLIYLASSRASGVPDRFSGSGSDKDFTLKISRVETEDVGTYYCMQGRESPWTFGQGTKVDIKSSASTKGPSVFPLAPSSKSTSGGTAALGCLVKDYFPEPVTVSWNSGALTSGVHTFPAVLQSSGLYSLSSVVTVPSSSLGTQTYICNVNHKPSNTKVDKRVEPKSC

SEQ ID NO: 1323 - DNA, 1476 bp, synthetic construct; identical to SEQ ID NO: 363
  source 1..1476: mol_type = other DNA

SEQ ID NO: 1324 - RNA, 1476 nt, synthetic construct; identical to SEQ ID NO: 411
  source 1..1476: mol_type = other RNA

SEQ ID NO: 1325 - protein, 490 aa, synthetic construct
MDWIWRILFLVGAATGAHSQVHLTQSGPEVRKPGTSVKVSCKAPGNTLKTYDLHWVRSVPGQGLQWMGWISHEGDKKVIVERFKAKVTIDWDRSTNTAYLQLSGLTSGDTAVYYCAKGSKHRLRDYALYDDDGALNWAVDVDYLSNLEFWGQGTAVTVSSASTKGPSVFPLAPSSKSTSGGTAALGCLVEDYFPEPVTVSWNSGALTSGVHTFPAVLQSSGLYSLSSVVTVPSSSLGTQTYICNVNHKPSNTKVDDRVEPKSCDKTHTCPPCPAPELLGGPSVFLFPPKPKDTLMISRTPEVTCVVVDVSHEDPEVKFNWYVDGVEVHNAKTKPREEQYNSTYRVVSVLTVLHQDWLNGKEYKCKVSNKALPAPIEKTISKAKGQPREPQVYTLPPSREEMTKNQVSLTCLVKGFYPSDIAVEWESNGQPENNYKTTPPVLDSDGSFFLYSKLTVDKSRWQQGNVFSCSVLHEALHSHYTQKSLSLSPGK

SEQ ID NO: 1326 - DNA, 720 bp, synthetic construct
  source 1..720: mol_type = other DNA
atggattggatttggagaatcctgttcctcgtgggcgccgctaccggagcccactccgattttgtcctgactcagtctccacactctctgtccgtcacccctggagagtcggcctccatctcctgcaagtctagtcacagcctcattcatggtgataggaacaattatttggcttggtacgtacagaagccagggcggtctccacaactcctgatctatttggcttccagtcgggcctccggggtccctgacaggttcagtggcagtggatcggacaaagattttacactgaagatcagcagagtggagactgaggatgttgggacgtattactgcatgcaaggtcgagaaagtccctggacgttcggccaagggaccaaggtggacatcaaacgtacggtggccgctcctagcgtgttcatctttccacctagcgacaagagactgaagtctggcacagcctctgtcgtgtgcctgctcaacaacttctaccccagagaagccaaggtgcagtggaaggtggacaacgccctgcagagcggcaatagccaagagagcgtgaccgagcaggacagcaaggactctacctacagcctgagcagcacactgaccctgagcaaggccgactacgagaagcacaaagtgtacgcctgcgaagtgacccaccagggcctttctagccctgtgaccaagagcttcaaccggggcgagtgctgataa

SEQ ID NO: 1327 - RNA, 720 nt, synthetic construct; identical to SEQ ID NO: 848
  source 1..720: mol_type = other RNA

SEQ ID NO: 1328 - protein, 238 aa, synthetic construct
MDWIWRILFLVGAATGAHSDFVLTQSPHSLSVTPGESASISCKSSHSLIHGDRNNYLAWYVQKPGRSPQLLIYLASSRASGVPDRFSGSGSDKDFTLKISRVETEDVGTYYCMQGRESPWTFGQGTKVDIKRTVAAPSVFIFPPSDKRLKSGTASVVCLLNNFYPREAKVQWKVDNALQSGNSQESVTEQDSKDSTYSLSSTLTLSKADYEKHKVYACEVTHQGLSSPVTKSFNRGEC

SEQ ID NO: 1329 - DNA, 1488 bp, synthetic construct; identical to SEQ ID NO: 268
  source 1..1488: mol_type = other DNA

SEQ ID NO: 1330 - RNA, 1488 nt, synthetic construct; identical to SEQ ID NO: 316
  source 1..1488: mol_type = other RNA

SEQ ID NO: 1331 - protein, 494 aa, synthetic construct
MDWIWRILFLVGAATGAHSQVHLTQSGPEVRKPGTSVKVSCKAPGNTLKTYDLHWVRSVPGQGLQWMGWISHEGDKKVIVERFKAKVTIDWDRSTNTAYLQLSGLTSGDTAVYYCAKGSKHRLRDYALYDDDGALNWAVDVDYLSNLEFWGQGTAVTVSSASVAAPSVFIFPPSDEELKSGTASVVCLLNNFYPREAKVQWKVDNALQSGNSQESVTEQDSKDSTYSLSSTLTLSKADYEKHKVYACEVTHQGLSSPVTKSFNRGECDKTHTCPPCPAPELLAGPSVFLFPPKPKDTLMISRTPEVTCVVVDVSHEDPEVKFNWYVDGVEVHNAKTKPREEQYNSTYRVVSVLTVLHQDWLNGKEYKCKVSNKALPLPEEKTISKAKGQPREPQVYTLPPSREEMTKNQVSLTCLVKGFYPSDIAVEWESNGQPENNYKTTPPVLDSDGSFFLYSKLTVDKSRWQQGNVFSCSVLHEALHSHYTQKSLSLSPGK

SEQ ID NO: 1332 - DNA, 1488 bp, synthetic construct; identical to SEQ ID NO: 272
  source 1..1488: mol_type = other DNA

SEQ ID NO: 1333 - RNA, 1488 nt, synthetic construct; identical to SEQ ID NO: 320
  source 1..1488: mol_type = other RNA

SEQ ID NO: 1334 - protein, 494 aa, synthetic construct
MDWIWRILFLVGAATGAHSQVHLTQSGPEVRKPGTSVKVSCKAPGNTLKTYDLHWVRSVPGQGLQWMGWISHEGDKKVIVERFKAKVTIDWDRSTNTAYLQLSGLTSGDTAVYYCAKGSKHRLRDYALYDDDGALNWAVDVDYLSNLEFWGQGTAVTVSSASVAAPSVFIFPPSDEELKSGTASVVCLLNNFYPREAKVQWKVDNALQSGNSQESVTEQDSKDSTYSLSSTLTLSKADYEKHKVYACEVTHQGLSSPVTKSFNRGECDKTHTCPPCPAPELLGGPSVFLFPPKPKDTLMISRTPEVTCVVVDVSHEDPEVKFNWYVDGVEVHNAKTKPREEQYNSTYRVVSVLTVLHQDWLNGKEYKCKVSNKALPAPIEKTISKAKGQPREPQVCTLPPSREEMTKNQVSLSCAVKGFYPSDIAVEWESNGQPENNYKTTPPVLDSDGSFFLVSKLTVDKSRWQQGNVFSCSVLHEALHSHYTQKSLSLSPGK

SEQ ID NO: 1335 - DNA, 1488 bp, synthetic construct; identical to SEQ ID NO: 273
  source 1..1488: mol_type = other DNA

SEQ ID NO: 1336 - RNA, 1488 nt, synthetic construct; identical to SEQ ID NO: 321
  source 1..1488: mol_type = other RNA

SEQ ID NO: 1337 - protein, 494 aa, synthetic construct
MDWIWRILFLVGAATGAHSQVHLTQSGPEVRKPGTSVKVSCKAPGNTLKTYDLHWVRSVPGQGLQWMGWISHEGDKKVIVERFKAKVTIDWDRSTNTAYLQLSGLTSGDTAVYYCAKGSKHRLRDYALYDDDGALNWAVDVDYLSNLEFWGQGTAVTVSSASVAAPSVFIFPPSDEELKSGTASVVCLLNNFYPREAKVQWKVDNALQSGNSQESVTEQDSKDSTYSLSSTLTLSKADYEKHKVYACEVTHQGLSSPVTKSFNRGECDKTHTCPPCPAPELLAGPSVFLFPPKPKDTLMISRTPEVTCVVVDVSHEDPEVKFNWYVDGVEVHNAKTKPREEQYNSTYRVVSVLTVLHQDWLNGKEYKCKVSNKALPLPEEKTISKAKGQPREPQVCTLPPSREEMTKNQVSLSCAVKGFYPSDIAVEWESNGQPENNYKTTPPVLDSDGSFFLVSKLTVDKSRWQQGNVFSCSVLHEALHSHYTQKSLSLSPGK

SEQ ID NO: 1338 - DNA, 1488 bp, synthetic construct; identical to SEQ ID NO: 277
  source 1..1488: mol_type = other DNA

SEQ ID NO: 1339 - RNA, 1488 nt, synthetic construct; identical to SEQ ID NO: 325
  source 1..1488: mol_type = other RNA

SEQ ID NO: 1340 - protein, 494 aa, synthetic construct
MDWIWRILFLVGAATGAHSQVHLTQSGPEVRKPGTSVKVSCKAPGNTLKTYDLHWVRSVPGQGLQWMGWISHEGDKKVIVERFKAKVTIDWDRSTNTAYLQLSGLTSGDTAVYYCAKGSKHRLRDYALYDDDGALNWAVDVDYLSNLEFWGQGTAVTVSSASVAAPSVFIFPPSDEELKSGTASVVCLLNNFYPREAKVQWKVDNALQSGNSQESVTEQDSKDSTYSLSSTLTLSKADYEKHKVYACEVTHQGLSSPVTKSFNRGECDKTHTCPPCPAPELLGGPSVFLFPPKPKDTLMISRTPEVTCVVVDVSHEDPEVKFNWYVDGVEVHNAKTKPREEQYNSTYRVVSVLTVLHQDWLNGKEYKCKVSNKALPAPIEKTISKAKGQPREPQVYTLPPCREEMTKNQVSLWCLVKGFYPSDIAVEWESNGQPENNYKTTPPVLDSDGSFFLYSKLTVDKSRWQQGNVFSCSVLHEALHSHYTQKSLSLSPGK

SEQ ID NO: 1341 - DNA, 1638 bp, synthetic construct; identical to SEQ ID NO: 459
  source 1..1638: mol_type = other DNA

SEQ ID NO: 1342 - RNA, 1638 nt, synthetic construct; identical to SEQ ID NO: 651
  source 1..1638: mol_type = other RNA

SEQ ID NO: 1343 - protein, 544 aa, synthetic construct
MDWIWRILFLVGAATGAHSQVHLTQSGPEVRKPGTSVKVSCKAPGNTLKTYDLHWVRSVPGQGLQWMGWISHEGDKKVIVERFKAKVTIDWDRSTNTAYLQLSGLTSGDTAVYYCAKGSKHRLRDYALYDDDGALNWAVDVDYLSNLEFWGQGTAVTVSSGGGGSGGGGSGGGGSGGGGSDFVLTQSPHSLSVTPGESASISCKSSHSLIHGDRNNYLAWYVQKPGRSPQLLIYLASSRASGVPDRFSGSGSDKDFTLKISRVETEDVGTYYCMQGRESPWTFGQGTKVDIKGGGGSGGGGSGGGGSGGGGSEPKSSDKTHTCPPCPAPELLGGPSVFLFPPKPKDTLMISRTPEVTCVVVDVSHEDPEVKFNWYVDGVEVHNAKTKPREEQYNSTYRVVSVLTVLHQDWLNGKEYKCKVSNKALPAPIEKTISKAKGQPREPQVYTLPPSREEMTKNQVSLTCLVKGFYPSDIAVEWESNGQPENNYKTTPPVLDSDGSFFLYSKLTVDKSRWQQGNVFSCSVLHEALHSHYTQKSLSLSPGK

SEQ ID NO: 1344 - DNA, 1653 bp, synthetic construct; identical to SEQ ID NO: 555
  source 1..1653: mol_type = other DNA

SEQ ID NO: 1345 - RNA, 1653 nt, synthetic construct; identical to SEQ ID NO: 747
  source 1..1653: mol_type = other RNA

SEQ ID NO: 1346 - protein, 549 aa, synthetic construct
MDWIWRILFLVGAATGAHSQVHLTQSGPEVRKPGTSVKVSCKAPGNTLKTYDLHWVRSVPGQGLQWMGWISHEGDKKVIVERFKAKVTIDWDRSTNTAYLQLSGLTSGDTAVYYCAKGSKHRLRDYALYDDDGALNWAVDVDYLSNLEFWGQGTAVTVSSGGGGSGGGGSGGGGSGGGGSGGGGSDFVLTQSPHSLSVTPGESASISCKSSHSLIHGDRNNYLAWYVQKPGRSPQLLIYLASSRASGVPDRFSGSGSDKDFTLKISRVETEDVGTYYCMQGRESPWTFGQGTKVDIKGGGGSGGGGSGGGGSGGGGSEPKSSDKTHTCPPCPAPELLGGPSVFLFPPKPKDTLMISRTPEVTCVVVDVSHEDPEVKFNWYVDGVEVHNAKTKPREEQYNSTYRVVSVLTVLHQDWLNGKEYKCKVSNKALPAPIEKTISKAKGQPREPQVYTLPPSREEMTKNQVSLTCLVKGFYPSDIAVEWESNGQPENNYKTTPPVLDSDGSFFLYSKLTVDKSRWQQGNVFSCSVLHEALHSHYTQKSLSLSPGK

SEQ ID NO: 1347 - DNA, 1638 bp, synthetic construct; identical to SEQ ID NO: 507
  source 1..1638: mol_type = other DNA

SEQ ID NO: 1348 - RNA, 1638 nt, synthetic construct; identical to SEQ ID NO: 699
  source 1..1638: mol_type = other RNA

SEQ ID NO: 1349 - protein, 544 aa, synthetic construct
MDWIWRILFLVGAATGAHSDFVLTQSPHSLSVTPGESASISCKSSHSLIHGDRNNYLAWYVQKPGRSPQLLIYLASSRASGVPDRFSGSGSDKDFTLKISRVETEDVGTYYCMQGRESPWTFGQGTKVDIKGGGGSGGGGSGGGGSGGGGSQVHLTQSGPEVRKPGTSVKVSCKAPGNTLKTYDLHWVRSVPGQGLQWMGWISHEGDKKVIVERFKAKVTIDWDRSTNTAYLQLSGLTSGDTAVYYCAKGSKHRLRDYALYDDDGALNWAVDVDYLSNLEFWGQGTAVTVSSGGGGSGGGGSGGGGSGGGGSEPKSSDKTHTCPPCPAPELLGGPSVFLFPPKPKDTLMISRTPEVTCVVVDVSHEDPEVKFNWYVDGVEVHNAKTKPREEQYNSTYRVVSVLTVLHQDWLNGKEYKCKVSNKALPAPIEKTISKAKGQPREPQVYTLPPSREEMTKNQVSLTCLVKGFYPSDIAVEWESNGQPENNYKTTPPVLDSDGSFFLYSKLTVDKSRWQQGNVFSCSVLHEALHSHYTQKSLSLSPGK

SEQ ID NO: 1350 - DNA, 1653 bp, synthetic construct; identical to SEQ ID NO: 603
  source 1..1653: mol_type = other DNA

SEQ ID NO: 1351 - RNA, 1653 nt, synthetic construct; identical to SEQ ID NO: 795
  source 1..1653: mol_type = other RNA

SEQ ID NO: 1352 - protein, 549 aa, synthetic construct
MDWIWRILFLVGAATGAHSDFVLTQSPHSLSVTPGESASISCKSSHSLIHGDRNNYLAWYVQKPGRSPQLLIYLASSRASGVPDRFSGSGSDKDFTLKISRVETEDVGTYYCMQGRESPWTFGQGTKVDIKGGGGSGGGGSGGGGSGGGGSGGGGSQVHLTQSGPEVRKPGTSVKVSCKAPGNTLKTYDLHWVRSVPGQGLQWMGWISHEGDKKVIVERFKAKVTIDWDRSTNTAYLQLSGLTSGDTAVYYCAKGSKHRLRDYALYDDDGALNWAVDVDYLSNLEFWGQGTAVTVSSGGGGSGGGGSGGGGSGGGGSEPKSSDKTHTCPPCPAPELLGGPSVFLFPPKPKDTLMISRTPEVTCVVVDVSHEDPEVKFNWYVDGVEVHNAKTKPREEQYNSTYRVVSVLTVLHQDWLNGKEYKCKVSNKALPAPIEKTISKAKGQPREPQVYTLPPSREEMTKNQVSLTCLVKGFYPSDIAVEWESNGQPENNYKTTPPVLDSDGSFFLYSKLTVDKSRWQQGNVFSCSVLHEALHSHYTQKSLSLSPGK

SEQ ID NO: 1353 - DNA, 720 bp, synthetic construct
  source 1..720: mol_type = other DNA
atggattggatttggagaatcctgttcctcgtgggcgccgctaccggagcccactccgattttgtcctgactcagtctccacactctctgtccgtcacccctggagagtcggcctccatctcctgcaagtctagtcacagcctcattcatggtgataggaacaattatttggcttggtacgtacagaagccagggcggtctccacaactcctgatctatttggcttccagtcgggcctccggggtccctgacaggttcagtggcagtggatcggacaaagattttacactgaagatcagcagagtggagactgaggatgttgggacgtattactgcatgcaaggtcgagaaagtccctggacgttcggccaagggaccaaggtggacatcaaacgtacggtggccgctcctagcgtgttcatctttccacctagcgacagaaagctgaagtctggcacagcctctgtcgtgtgcctgctcaacaacttctaccccagagaagccaaggtgcagtggaaggtggacaacgccctgcagagcggcaatagccaagagagcgtgaccgagcaggacagcaaggactctacctacagcctgagcagcacactgaccctgagcaaggccgactacgagaagcacaaagtgtacgcctgcgaagtgacccaccagggcctttctagccctgtgaccaagagcttcaaccggggcgagtgctgataa

SEQ ID NO: 1354 - RNA, 720 nt, synthetic construct; identical to SEQ ID NO: 849
  source 1..720: mol_type = other RNA

SEQ ID NO: 1355 - protein, 238 aa, synthetic construct
MDWIWRILFLVGAATGAHSDFVLTQSPHSLSVTPGESASISCKSSHSLIHGDRNNYLAWYVQKPGRSPQLLIYLASSRASGVPDRFSGSGSDKDFTLKISRVETEDVGTYYCMQGRESPWTFGQGTKVDIKRTVAAPSVFIFPPSDRKLKSGTASVVCLLNNFYPREAKVQWKVDNALQSGNSQESVTEQDSKDSTYSLSSTLTLSKADYEKHKVYACEVTHQGLSSPVTKSFNRGEC

SEQ ID NO: 1356 - DNA, 1638 bp, synthetic construct; identical to SEQ ID NO: 458
  source 1..1638: mol_type = other DNA

SEQ ID NO: 1357 - RNA, 1638 nt, synthetic construct; identical to SEQ ID NO: 650
  source 1..1638: mol_type = other RNA

SEQ ID NO: 1358 - protein, 544 aa, synthetic construct
MDWIWRILFLVGAATGAHSQVHLTQSGPEVRKPGTSVKVSCKAPGNTLKTYDLHWVRSVPGQGLQWMGWISHEGDKKVIVERFKAKVTIDWDRSTNTAYLQLSGLTSGDTAVYYCAKGSKHRLRDYALYDDDGALNWAVDVDYLSNLEFWGQGTAVTVSSGGGGSGGGGSGGGGSGGGGSDFVLTQSPHSLSVTPGESASISCKSSHSLIHGDRNNYLAWYVQKPGRSPQLLIYLASSRASGVPDRFSGSGSDKDFTLKISRVETEDVGTYYCMQGRESPWTFGQGTKVDIKGGGGSGGGGSGGGGSGGGGSEPKSSDKTHTCPPCPAPELLGGPSVFLFPPKPKDTLMISRTPEVTCVVVDVSHEDPEVKFNWYVDGVEVHNAKTKPREEQYNSTYRVVSVLTVLHQDWLNGKEYKCKVSNKALPAPIEKTISKAKGQPREPQVYTLPPSREEMTKNQVSLTCLVKGFYPSDIAVEWESNGQPENNYKTTPPVLDSDGSFFLYSKLTVDKSRWQQGNVFSCSVMHEALHNHYTQKSLSLSPGK

SEQ ID NO: 1359 - DNA, 1638 bp, synthetic construct; identical to SEQ ID NO: 464
  source 1..1638: mol_type = other DNA

SEQ ID NO: 1360 - RNA, 1638 nt, synthetic construct; identical to SEQ ID NO: 656
  source 1..1638: mol_type = other RNA

SEQ ID NO: 1361 - protein, 544 aa, synthetic construct
MDWIWRILFLVGAATGAHSQVHLTQSGPEVRKPGTSVKVSCKAPGNTLKTYDLHWVRSVPGQGLQWMGWISHEGDKKVIVERFKAKVTIDWDRSTNTAYLQLSGLTSGDTAVYYCAKGSKHRLRDYALYDDDGALNWAVDVDYLSNLEFWGQGTAVTVSSGGGGSGGGGSGGGGSGGGGSDFVLTQSPHSLSVTPGESASISCKSSHSLIHGDRNNYLAWYVQKPGRSPQLLIYLASSRASGVPDRFSGSGSDKDFTLKISRVETEDVGTYYCMQGRESPWTFGQGTKVDIKGGGGSGGGGSGGGGSGGGGSEPKSSDKTHTCPPCPAPELLGGPSVFLFPPKPKDTLMISRTPEVTCVVVDVSHEDPEVKFNWYVDGVEVHNAKTKPREEQYNSTYRVVSVLTVLHQDWLNGKEYKCKVSNKALPAPIEKTISKAKGQPREPQVCTLPPSREEMTKNQVSLSCAVKGFYPSDIAVEWESNGQPENNYKTTPPVLDSDGSFFLVSKLTVDKSRWQQGNVFSCSVLHEALHSHYTQKSLSLSPGK

SEQ ID NO: 1362 - DNA, 1638 bp, synthetic construct; identical to SEQ ID NO: 469
  source 1..1638: mol_type = other DNA

SEQ ID NO: 1363 - RNA, 1638 nt, synthetic construct; identical to SEQ ID NO: 661
  source 1..1638: mol_type = other RNA

SEQ ID NO: 1364 - protein, 544 aa, synthetic construct
MDWIWRILFLVGAATGAHSQVHLTQSGPEVRKPGTSVKVSCKAPGNTLKTYDLHWVRSVPGQGLQWMGWISHEGDKKVIVERFKAKVTIDWDRSTNTAYLQLSGLTSGDTAVYYCAKGSKHRLRDYALYDDDGALNWAVDVDYLSNLEFWGQGTAVTVSSGGGGSGGGGSGGGGSGGGGSDFVLTQSPHSLSVTPGESASISCKSSHSLIHGDRNNYLAWYVQKPGRSPQLLIYLASSRASGVPDRFSGSGSDKDFTLKISRVETEDVGTYYCMQGRESPWTFGQGTKVDIKGGGGSGGGGSGGGGSGGGGSEPKSSDKTHTCPPCPAPELLGGPSVFLFPPKPKDTLMISRTPEVTCVVVDVSHEDPEVKFNWYVDGVEVHNAKTKPREEQYNSTYRVVSVLTVLHQDWLNGKEYKCKVSNKALPAPIEKTISKAKGQPREPQVYTLPPCREEMTKNQVSLWCLVKGFYPSDIAVEWESNGQPENNYKTTPPVLDSDGSFFLYSKLTVDKSRWQQGNVFSCSVLHEALHSHYTQKSLSLSPGK

SEQ ID NO: 1365 - DNA, 1653 bp, synthetic construct; identical to SEQ ID NO: 554
  source 1..1653: mol_type = other DNA

SEQ ID NO: 1366 - RNA, 1653 nt, synthetic construct; identical to SEQ ID NO: 746
  source 1..1653: mol_type = other RNA

SEQ ID NO: 1367 - protein, 549 aa, synthetic construct
MDWIWRILFLVGAATGAHSQVHLTQSGPEVRKPGTSVKVSCKAPGNTLKTYDLHWVRSVPGQGLQWMGWISHEGDKKVIVERFKAKVTIDWDRSTNTAYLQLSGLTSGDTAVYYCAKGSKHRLRDYALYDDDGALNWAVDVDYLSNLEFWGQGTAVTVSSGGGGSGGGGSGGGGSGGGGSGGGGSDFVLTQSPHSLSVTPGESASISCKSSHSLIHGDRNNYLAWYVQKPGRSPQLLIYLASSRASGVPDRFSGSGSDKDFTLKISRVETEDVGTYYCMQGRESPWTFGQGTKVDIKGGGGSGGGGSGGGGSGGGGSEPKSSDKTHTCPPCPAPELLGGPSVFLFPPKPKDTLMISRTPEVTCVVVDVSHEDPEVKFNWYVDGVEVHNAKTKPREEQYNSTYRVVSVLTVLHQDWLNGKEYKCKVSNKALPAPIEKTISKAKGQPREPQVYTLPPSREEMTKNQVSLTCLVKGFYPSDIAVEWESNGQPENNYKTTPPVLDSDGSFFLYSKLTVDKSRWQQGNVFSCSVMHEALHNHYTQKSLSLSPGK

SEQ ID NO: 1368 - DNA, 1653 bp, synthetic construct; identical to SEQ ID NO: 556
  source 1..1653: mol_type = other DNA

SEQ ID NO: 1369 - RNA, 1653 nt, synthetic construct; identical to SEQ ID NO: 748
  source 1..1653: mol_type = other RNA

SEQ ID NO: 1370 - protein, 549 aa, synthetic construct
MDWIWRILFLVGAATGAHSQVHLTQSGPEVRKPGTSVKVSCKAPGNTLKTYDLHWVRSVPGQGLQWMGWISHEGDKKVIVERFKAKVTIDWDRSTNTAYLQLSGLTSGDTAVYYCAKGSKHRLRDYALYDDDGALNWAVDVDYLSNLEFWGQGTAVTVSSGGGGSGGGGSGGGGSGGGGSGGGGSDFVLTQSPHSLSVTPGESASISCKSSHSLIHGDRNNYLAWYVQKPGRSPQLLIYLASSRASGVPDRFSGSGSDKDFTLKISRVETEDVGTYYCMQGRESPWTFGQGTKVDIKGGGGSGGGGSGGGGSGGGGSEPKSSDKTHTCPPCPAPELLAGPSVFLFPPKPKDTLMISRTPEVTCVVVDVSHEDPEVKFNWYVDGVEVHNAKTKPREEQYNSTYRVVSVLTVLHQDWLNGKEYKCKVSNKALPLPEEKTISKAKGQPREPQVYTLPPSREEMTKNQVSLTCLVKGFYPSDIAVEWESNGQPENNYKTTPPVLDSDGSFFLYSKLTVDKSRWQQGNVFSCSVLHEALHSHYTQKSLSLSPGK

SEQ ID NO: 1371 - DNA, 1653 bp, synthetic construct; identical to SEQ ID NO: 560
  source 1..1653: mol_type = other DNA

SEQ ID NO: 1372 - RNA, 1653 nt, synthetic construct; identical to SEQ ID NO: 752
  source 1..1653: mol_type = other RNA

SEQ ID NO: 1373 - protein, 549 aa, synthetic construct
MDWIWRILFLVGAATGAHSQVHLTQSGPEVRKPGTSVKVSCKAPGNTLKTYDLHWVRSVPGQGLQWMGWISHEGDKKVIVERFKAKVTIDWDRSTNTAYLQLSGLTSGDTAVYYCAKGSKHRLRDYALYDDDGALNWAVDVDYLSNLEFWGQGTAVTVSSGGGGSGGGGSGGGGSGGGGSGGGGSDFVLTQSPHSLSVTPGESASISCKSSHSLIHGDRNNYLAWYVQKPGRSPQLLIYLASSRASGVPDRFSGSGSDKDFTLKISRVETEDVGTYYCMQGRESPWTFGQGTKVDIKGGGGSGGGGSGGGGSGGGGSEPKSSDKTHTCPPCPAPELLGGPSVFLFPPKPKDTLMISRTPEVTCVVVDVSHEDPEVKFNWYVDGVEVHNAKTKPREEQYNSTYRVVSVLTVLHQDWLNGKEYKCKVSNKALPAPIEKTISKAKGQPREPQVCTLPPSREEMTKNQVSLSCAVKGFYPSDIAVEWESNGQPENNYKTTPPVLDSDGSFFLVSKLTVDKSRWQQGNVFSCSVLHEALHSHYTQKSLSLSPGK

SEQ ID NO: 1374 - DNA, 1653 bp, synthetic construct; identical to SEQ ID NO: 561
  source 1..1653: mol_type = other DNA

SEQ ID NO: 1375 - RNA, 1653 nt, synthetic construct; identical to SEQ ID NO: 753
  source 1..1653: mol_type = other RNA

SEQ ID NO: 1376 - protein, 549 aa, synthetic construct
MDWIWRILFLVGAATGAHSQVHLTQSGPEVRKPGTSVKVSCKAPGNTLKTYDLHWVRSVPGQGLQWMGWISHEGDKKVIVERFKAKVTIDWDRSTNTAYLQLSGLTSGDTAVYYCAKGSKHRLRDYALYDDDGALNWAVDVDYLSNLEFWGQGTAVTVSSGGGGSGGGGSGGGGSGGGGSGGGGSDFVLTQSPHSLSVTPGESASISCKSSHSLIHGDRNNYLAWYVQKPGRSPQLLIYLASSRASGVPDRFSGSGSDKDFTLKISRVETEDVGTYYCMQGRESPWTFGQGTKVDIKGGGGSGGGGSGGGGSGGGGSEPKSSDKTHTCPPCPAPELLAGPSVFLFPPKPKDTLMISRTPEVTCVVVDVSHEDPEVKFNWYVDGVEVHNAKTKPREEQYNSTYRVVSVLTVLHQDWLNGKEYKCKVSNKALPLPEEKTISKAKGQPREPQVCTLPPSREEMTKNQVSLSCAVKGFYPSDIAVEWESNGQPENNYKTTPPVLDSDGSFFLVSKLTVDKSRWQQGNVFSCSVLHEALHSHYTQKSLSLSPGK

SEQ ID NO: 1377 - DNA, 1653 bp, synthetic construct; identical to SEQ ID NO: 565
  source 1..1653: mol_type = other DNA

SEQ ID NO: 1378 - RNA, 1653 nt, synthetic construct; identical to SEQ ID NO: 757
  source 1..1653: mol_type = other RNA

SEQ ID NO: 1379 - protein, 549 aa, synthetic construct
MDWIWRILFLVGAATGAHSQVHLTQSGPEVRKPGTSVKVSCKAPGNTLKTYDLHWVRSVPGQGLQWMGWISHEGDKKVIVERFKAKVTIDWDRSTNTAYLQLSGLTSGDTAVYYCAKGSKHRLRDYALYDDDGALNWAVDVDYLSNLEFWGQGTAVTVSSGGGGSGGGGSGGGGSGGGGSGGGGSDFVLTQSPHSLSVTPGESASISCKSSHSLIHGDRNNYLAWYVQKPGRSPQLLIYLASSRASGVPDRFSGSGSDKDFTLKISRVETEDVGTYYCMQGRESPWTFGQGTKVDIKGGGGSGGGGSGGGGSGGGGSEPKSSDKTHTCPPCPAPELLGGPSVFLFPPKPKDTLMISRTPEVTCVVVDVSHEDPEVKFNWYVDGVEVHNAKTKPREEQYNSTYRVVSVLTVLHQDWLNGKEYKCKVSNKALPAPIEKTISKAKGQPREPQVYTLPPCREEMTKNQVSLWCLVKGFYPSDIAVEWESNGQPENNYKTTPPVLDSDGSFFLYSKLTVDKSRWQQGNVFSCSVLHEALHSHYTQKSLSLSPGK

SEQ ID NO: 1380 - DNA, 1653 bp, synthetic construct; identical to SEQ ID NO: 566
  source 1..1653: mol_type = other DNA

SEQ ID NO: 1381 - RNA, 1653 nt, synthetic construct; identical to SEQ ID NO: 758
  source 1..1653: mol_type = other RNA

SEQ ID NO: 1382 - protein, 549 aa, synthetic construct
MDWIWRILFLVGAATGAHSQVHLTQSGPEVRKPGTSVKVSCKAPGNTLKTYDLHWVRSVPGQGLQWMGWISHEGDKKVIVERFKAKVTIDWDRSTNTAYLQLSGLTSGDTAVYYCAKGSKHRLRDYALYDDDGALNWAVDVDYLSNLEFWGQGTAVTVSSGGGGSGGGGSGGGGSGGGGSGGGGSDFVLTQSPHSLSVTPGESASISCKSSHSLIHGDRNNYLAWYVQKPGRSPQLLIYLASSRASGVPDRFSGSGSDKDFTLKISRVETEDVGTYYCMQGRESPWTFGQGTKVDIKGGGGSGGGGSGGGGSGGGGSEPKSSDKTHTCPPCPAPELLAGPSVFLFPPKPKDTLMISRTPEVTCVVVDVSHEDPEVKFNWYVDGVEVHNAKTKPREEQYNSTYRVVSVLTVLHQDWLNGKEYKCKVSNKALPLPEEKTISKAKGQPREPQVYTLPPCREEMTKNQVSLWCLVKGFYPSDIAVEWESNGQPENNYKTTPPVLDSDGSFFLYSKLTVDKSRWQQGNVFSCSVLHEALHSHYTQKSLSLSPGK

SEQ ID NO: 1383 - DNA, 1638 bp, synthetic construct; identical to SEQ ID NO: 506
  source 1..1638: mol_type = other DNA

SEQ ID NO: 1384 - RNA, 1638 nt, synthetic construct; identical to SEQ ID NO: 698
  source 1..1638: mol_type = other RNA

SEQ ID NO: 1385 - protein, 544 aa, synthetic construct
MDWIWRILFLVGAATGAHSDFVLTQSPHSLSVTPGESASISCKSSHSLIHGDRNNYLAWYVQKPGRSPQLLIYLASSRASGVPDRFSGSGSDKDFTLKISRVETEDVGTYYCMQGRESPWTFGQGTKVDIKGGGGSGGGGSGGGGSGGGGSQVHLTQSGPEVRKPGTSVKVSCKAPGNTLKTYDLHWVRSVPGQGLQWMGWISHEGDKKVIVERFKAKVTIDWDRSTNTAYLQLSGLTSGDTAVYYCAKGSKHRLRDYALYDDDGALNWAVDVDYLSNLEFWGQGTAVTVSSGGGGSGGGGSGGGGSGGGGSEPKSSDKTHTCPPCPAPELLGGPSVFLFPPKPKDTLMISRTPEVTCVVVDVSHEDPEVKFNWYVDGVEVHNAKTKPREEQYNSTYRVVSVLTVLHQDWLNGKEYKCKVSNKALPAPIEKTISKAKGQPREPQVYTLPPSREEMTKNQVSLTCLVKGFYPSDIAVEWESNGQPENNYKTTPPVLDSDGSFFLYSKLTVDKSRWQQGNVFSCSVMHEALHNHYTQKSLSLSPGK

SEQ ID NO: 1386 - DNA, 1638 bp, synthetic construct; identical to SEQ ID NO: 508
  source 1..1638: mol_type = other DNA

SEQ ID NO: 1387 - RNA, 1638 nt, synthetic construct; identical to SEQ ID NO: 700
  source 1..1638: mol_type = other RNA

SEQ ID NO: 1388 - protein, 544 aa, synthetic construct
MDWIWRILFLVGAATGAHSDFVLTQSPHSLSVTPGESASISCKSSHSLIHGDRNNYLAWYVQKPGRSPQLLIYLASSRASGVPDRFSGSGSDKDFTLKISRVETEDVGTYYCMQGRESPWTFGQGTKVDIKGGGGSGGGGSGGGGSGGGGSQVHLTQSGPEVRKPGTSVKVSCKAPGNTLKTYDLHWVRSVPGQGLQWMGWISHEGDKKVIVERFKAKVTIDWDRSTNTAYLQLSGLTSGDTAVYYCAKGSKHRLRDYALYDDDGALNWAVDVDYLSNLEFWGQGTAVTVSSGGGGSGGGGSGGGGSGGGGSEPKSSDKTHTCPPCPAPELLAGPSVFLFPPKPKDTLMISRTPEVTCVVVDVSHEDPEVKFNWYVDGVEVHNAKTKPREEQYNSTYRVVSVLTVLHQDWLNGKEYKCKVSNKALPLPEEKTISKAKGQPREPQVYTLPPSREEMTKNQVSLTCLVKGFYPSDIAVEWESNGQPENNYKTTPPVLDSDGSFFLYSKLTVDKSRWQQGNVFSCSVLHEALHSHYTQKSLSLSPGK

SEQ ID NO: 1389 - DNA, 1638 bp, synthetic construct; identical to SEQ ID NO: 512
  source 1..1638: mol_type = other DNA

SEQ ID NO: 1390 - RNA, 1638 nt, synthetic construct; identical to SEQ ID NO: 704
  source 1..1638: mol_type = other RNA

SEQ ID NO: 1391 - protein, 544 aa, synthetic construct
MDWIWRILFLVGAATGAHSDFVLTQSPHSLSVTPGESASISCKSSHSLIHGDRNNYLAWYVQKPGRSPQLLIYLASSRASGVPDRFSGSGSDKDFTLKISRVETEDVGTYYCMQGRESPWTFGQGTKVDIKGGGGSGGGGSGGGGSGGGGSQVHLTQSGPEVRKPGTSVKVSCKAPGNTLKTYDLHWVRSVPGQGLQWMGWISHEGDKKVIVERFKAKVTIDWDRSTNTAYLQLSGLTSGDTAVYYCAKGSKHRLRDYALYDDDGALNWAVDVDYLSNLEFWGQGTAVTVSSGGGGSGGGGSGGGGSGGGGSEPKSSDKTHTCPPCPAPELLGGPSVFLFPPKPKDTLMISRTPEVTCVVVDVSHEDPEVKFNWYVDGVEVHNAKTKPREEQYNSTYRVVSVLTVLHQDWLNGKEYKCKVSNKALPAPIEKTISKAKGQPREPQVCTLPPSREEMTKNQVSLSCAVKGFYPSDIAVEWESNGQPENNYKTTPPVLDSDGSFFLVSKLTVDKSRWQQGNVFSCSVLHEALHSHYTQKSLSLSPGK

SEQ ID NO: 1392 - DNA, 1638 bp, synthetic construct; identical to SEQ ID NO: 513
  source 1..1638: mol_type = other DNA

SEQ ID NO: 1393 - RNA, 1638 nt, synthetic construct; identical to SEQ ID NO: 705
  source 1..1638: mol_type = other RNA

SEQ ID NO: 1394 - protein, 544 aa, synthetic construct
MDWIWRILFLVGAATGAHSDFVLTQSPHSLSVTPGESASISCKSSHSLIHGDRNNYLAWYVQKPGRSPQLLIYLASSRASGVPDRFSGSGSDKDFTLKISRVETEDVGTYYCMQGRESPWTFGQGTKVDIKGGGGSGGGGSGGGGSGGGGSQVHLTQSGPEVRKPGTSVKVSCKAPGNTLKTYDLHWVRSVPGQGLQWMGWISHEGDKKVIVERFKAKVTIDWDRSTNTAYLQLSGLTSGDTAVYYCAKGSKHRLRDYALYDDDGALNWAVDVDYLSNLEFWGQGTAVTVSSGGGGSGGGGSGGGGSGGGGSEPKSSDKTHTCPPCPAPELLAGPSVFLFPPKPKDTLMISRTPEVTCVVVDVSHEDPEVKFNWYVDGVEVHNAKTKPREEQYNSTYRVVSVLTVLHQDWLNGKEYKCKVSNKALPLPEEKTISKAKGQPREPQVCTLPPSREEMTKNQVSLSCAVKGFYPSDIAVEWESNGQPENNYKTTPPVLDSDGSFFLVSKLTVDKSRWQQGNVFSCSVLHEALHSHYTQKSLSLSPGK

SEQ ID NO: 1395 - DNA, 1638 bp, synthetic construct; identical to SEQ ID NO: 517
  source 1..1638: mol_type = other DNA

SEQ ID NO: 1396 - RNA, 1638 nt, synthetic construct; identical to SEQ ID NO: 709
  source 1..1638: mol_type = other RNA

SEQ ID NO: 1397 - protein, 544 aa, synthetic construct
MDWIWRILFLVGAATGAHSDFVLTQSPHSLSVTPGESASISCKSSHSLIHGDRNNYLAWYVQKPGRSPQLLIYLASSRASGVPDRFSGSGSDKDFTLKISRVETEDVGTYYCMQGRESPWTFGQGTKVDIKGGGGSGGGGSGGGGSGGGGSQVHLTQSGPEVRKPGTSVKVSCKAPGNTLKTYDLHWVRSVPGQGLQWMGWISHEGDKKVIVERFKAKVTIDWDRSTNTAYLQLSGLTSGDTAVYYCAKGSKHRLRDYALYDDDGALNWAVDVDYLSNLEFWGQGTAVTVSSGGGGSGGGGSGGGGSGGGGSEPKSSDKTHTCPPCPAPELLGGPSVFLFPPKPKDTLMISRTPEVTCVVVDVSHEDPEVKFNWYVDGVEVHNAKTKPREEQYNSTYRVVSVLTVLHQDWLNGKEYKCKVSNKALPAPIEKTISKAKGQPREPQVYTLPPCREEMTKNQVSLWCLVKGFYPSDIAVEWESNGQPENNYKTTPPVLDSDGSFFLYSKLTVDKSRWQQGNVFSCSVLHEALHSHYTQKSLSLSPGK

SEQ ID NO: 1398 - DNA, 1638 bp, synthetic construct; identical to SEQ ID NO: 518
  source 1..1638: mol_type = other DNA

SEQ ID NO: 1399 - RNA, 1638 nt, synthetic construct; identical to SEQ ID NO: 710
  source 1..1638: mol_type = other RNA

SEQ ID NO: 1400 - protein, 544 aa, synthetic construct
MDWIWRILFLVGAATGAHSDFVLTQSPHSLSVTPGESASISCKSSHSLIHGDRNNYLAWYVQKPGRSPQLLIYLASSRASGVPDRFSGSGSDKDFTLKISRVETEDVGTYYCMQGRESPWTFGQGTKVDIKGGGGSGGGGSGGGGSGGGGSQVHLTQSGPEVRKPGTSVKVSCKAPGNTLKTYDLHWVRSVPGQGLQWMGWISHEGDKKVIVERFKAKVTIDWDRSTNTAYLQLSGLTSGDTAVYYCAKGSKHRLRDYALYDDDGALNWAVDVDYLSNLEFWGQGTAVTVSSGGGGSGGGGSGGGGSGGGGSEPKSSDKTHTCPPCPAPELLAGPSVFLFPPKPKDTLMISRTPEVTCVVVDVSHEDPEVKFNWYVDGVEVHNAKTKPREEQYNSTYRVVSVLTVLHQDWLNGKEYKCKVSNKALPLPEEKTISKAKGQPREPQVYTLPPCREEMTKNQVSLWCLVKGFYPSDIAVEWESNGQPENNYKTTPPVLDSDGSFFLYSKLTVDKSRWQQGNVFSCSVLHEALHSHYTQKSLSLSPGK

SEQ ID NO: 1401 - DNA, 1638 bp, synthetic construct; identical to SEQ ID NO: 506
  source 1..1638: mol_type = other DNA

SEQ ID NO: 1402 - RNA, 1638 nt, synthetic construct; identical to SEQ ID NO: 698
  source 1..1638: mol_type = other RNA

SEQ ID NO: 1403 - protein, 544 aa, synthetic construct; identical to SEQ ID NO: 1385

SEQ ID NO: 1404 - DNA, 1638 bp, synthetic construct; identical to SEQ ID NO: 507
  source 1..1638: mol_type = other DNA

SEQ ID NO: 1405 - RNA, 1638 nt, synthetic construct; identical to SEQ ID NO: 699
  source 1..1638: mol_type = other RNA

SEQ ID NO: 1406 - protein, 544 aa, synthetic construct; identical to SEQ ID NO: 1349

SEQ ID NO: 1407 - DNA, 1638 bp, synthetic construct; identical to SEQ ID NO: 508
  source 1..1638: mol_type = other DNA

SEQ ID NO: 1408 - RNA, 1638 nt, synthetic construct; identical to SEQ ID NO: 700
  source 1..1638: mol_type = other RNA

SEQ ID NO: 1409 - protein, 544 aa, synthetic construct; identical to SEQ ID NO: 1388

SEQ ID NO: 1410 - DNA, 1638 bp, synthetic construct; identical to SEQ ID NO: 512
  source 1..1638: mol_type = other DNA

SEQ ID NO: 1411 - RNA, 1638 nt, synthetic construct; identical to SEQ ID NO: 704
  source 1..1638: mol_type = other RNA

SEQ ID NO: 1412 - protein, 544 aa, synthetic construct; identical to SEQ ID NO: 1391

SEQ ID NO: 1413 - DNA, 1638 bp, synthetic construct; identical to SEQ ID NO: 513
  source 1..1638: mol_type = other DNA

SEQ ID NO: 1414 - RNA, 1638 nt, synthetic construct; identical to SEQ ID NO: 705
  source 1..1638: mol_type = other RNA

SEQ ID NO: 1415 - protein, 544 aa, synthetic construct; identical to SEQ ID NO: 1394

SEQ ID NO: 1416 - DNA, 1638 bp, synthetic construct; identical to SEQ ID NO: 517
  source 1..1638: mol_type = other DNA

SEQ ID NO: 1417 - RNA, 1638 nt, synthetic construct; identical to SEQ ID NO: 709
  source 1..1638: mol_type = other RNA

SEQ ID NO: 1418 - protein, 544 aa, synthetic construct; identical to SEQ ID NO: 1397

SEQ ID NO: 1419 - DNA, 1638 bp, synthetic construct; identical to SEQ ID NO: 518
  source 1..1638: mol_type = other DNA

SEQ ID NO: 1420 - RNA, 1638 nt, synthetic construct; identical to SEQ ID NO: 710
  source 1..1638: mol_type = other RNA

SEQ ID NO: 1421 - protein, 544 aa, synthetic construct; identical to SEQ ID NO: 1400

SEQ ID NO: 1422 - DNA, 1653 bp, synthetic construct; identical to SEQ ID NO: 602
  source 1..1653: mol_type = other DNA

SEQ ID NO: 1423 - RNA, 1653 nt, synthetic construct; identical to SEQ ID NO: 794
  source 1..1653: mol_type = other RNA

SEQ ID NO: 1424 - protein, 549 aa, synthetic construct
MDWIWRILFLVGAATGAHSDFVLTQSPHSLSVTPGESASISCKSSHSLIHGDRNNYLAWYVQKPGRSPQLLIYLASSRASGVPDRFSGSGSDKDFTLKISRVETEDVGTYYCMQGRESPWTFGQGTKVDIKGGGGSGGGGSGGGGSGGGGSGGGGSQVHLTQSGPEVRKPGTSVKVSCKAPGNTLKTYDLHWVRSVPGQGLQWMGWISHEGDKKVIVERFKAKVTIDWDRSTNTAYLQLSGLTSGDTAVYYCAKGSKHRLRDYALYDDDGALNWAVDVDYLSNLEFWGQGTAVTVSSGGGGSGGGGSGGGGSGGGGSEPKSSDKTHTCPPCPAPELLGGPSVFLFPPKPKDTLMISRTPEVTCVVVDVSHEDPEVKFNWYVDGVEVHNAKTKPREEQYNSTYRVVSVLTVLHQDWLNGKEYKCKVSNKALPAPIEKTISKAKGQPREPQVYTLPPSREEMTKNQVSLTCLVKGFYPSDIAVEWESNGQPENNYKTTPPVLDSDGSFFLYSKLTVDKSRWQQGNVFSCSVMHEALHNHYTQKSLSLSPGK

SEQ ID NO: 1425 - DNA, 1653 bp, synthetic construct; identical to SEQ ID NO: 604
  source 1..1653: mol_type = other DNA

SEQ ID NO: 1426 - RNA, 1653 nt, synthetic construct; identical to SEQ ID NO: 796
  source 1..1653: mol_type = other RNA

SEQ ID NO: 1427 - protein, 549 aa, synthetic construct
MDWIWRILFLVGAATGAHSDFVLTQSPHSLSVTPGESASISCKSSHSLIHGDRNNYLAWYVQKPGRSPQLLIYLASSRASGVPDRFSGSGSDKDFTLKISRVETEDVGTYYCMQGRESPWTFGQGTKVDIKGGGGSGGGGSGGGGSGGGGSGGGGSQVHLTQSGPEVRKPGTSVKVSCKAPGNTLKTYDLHWVRSVPGQGLQWMGWISHEGDKKVIVERFKAKVTIDWDRSTNTAYLQLSGLTSGDTAVYYCAKGSKHRLRDYALYDDDGALNWAVDVDYLSNLEFWGQGTAVTVSSGGGGSGGGGSGGGGSGGGGSEPKSSDKTHTCPPCPAPELLAGPSVFLFPPKPKDTLMISRTPEVTCVVVDVSHEDPEVKFNWYVDGVEVHNAKTKPREEQYNSTYRVVSVLTVLHQDWLNGKEYKCKVSNKALPLPEEKTISKAKGQPREPQVYTLPPSREEMTKNQVSLTCLVKGFYPSDIAVEWESNGQPENNYKTTPPVLDSDGSFFLYSKLTVDKSRWQQGNVFSCSVLHEALHSHYTQKSLSLSPGK

SEQ ID NO: 1428 - DNA, 1653 bp, synthetic construct; identical to SEQ ID NO: 608
  source 1..1653: mol_type = other DNA

SEQ ID NO: 1429 - RNA, 1653 nt, synthetic construct; identical to SEQ ID NO: 800
  source 1..1653: mol_type = other RNA

SEQ ID NO: 1430 - protein, 549 aa, synthetic construct
MDWIWRILFLVGAATGAHSDFVLTQSPHSLSVTPGESASISCKSSHSLIHGDRNNYLAWYVQKPGRSPQLLIYLASSRASGVPDRFSGSGSDKDFTLKISRVETEDVGTYYCMQGRESPWTFGQGTKVDIKGGGGSGGGGSGGGGSGGGGSGGGGSQVHLTQSGPEVRKPGTSVKVSCKAPGNTLKTYDLHWVRSVPGQGLQWMGWISHEGDKKVIVERFKAKVTIDWDRSTNTAYLQLSGLTSGDTAVYYCAKGSKHRLRDYALYDDDGALNWAVDVDYLSNLEFWGQGTAVTVSSGGGGSGGGGSGGGGSGGGGSEPKSSDKTHTCPPCPAPELLGGPSVFLFPPKPKDTLMISRTPEVTCVVVDVSHEDPEVKFNWYVDGVEVHNAKTKPREEQYNSTYRVVSVLTVLHQDWLNGKEYKCKVSNKALPAPIEKTISKAKGQPREPQVCTLPPSREEMTKNQVSLSCAVKGFYPSDIAVEWESNGQPENNYKTTPPVLDSDGSFFLVSKLTVDKSRWQQGNVFSCSVLHEALHSHYTQKSLSLSPGK

SEQ ID NO: 1431 - DNA, 1653 bp, synthetic construct; identical to SEQ ID NO: 609
  source 1..1653: mol_type = other DNA

SEQ ID NO: 1432 - RNA, 1653 nt, synthetic construct; identical to SEQ ID NO: 801
  source 1..1653: mol_type = other RNA

SEQ ID NO: 1433 - protein, 549 aa, synthetic construct
MDWIWRILFLVGAATGAHSDFVLTQSPHSLSVTPGESASISCKSSHSLIHGDRNNYLAWYVQKPGRSPQLLIYLASSRASGVPDRFSGSGSDKDFTLKISRVETEDVGTYYCMQGRESPWTFGQGTKVDIKGGGGSGGGGSGGGGSGGGGSGGGGSQVHLTQSGPEVRKPGTSVKVSCKAPGNTLKTYDLHWVRSVPGQGLQWMGWISHEGDKKVIVERFKAKVTIDWDRSTNTAYLQLSGLTSGDTAVYYCAKGSKHRLRDYALYDDDGALNWAVDVDYLSNLEFWGQGTAVTVSSGGGGSGGGGSGGGGSGGGGSEPKSSDKTHTCPPCPAPELLAGPSVFLFPPKPKDTLMISRTPEVTCVVVDVSHEDPEVKFNWYVDGVEVHNAKTKPREEQYNSTYRVVSVLTVLHQDWLNGKEYKCKVSNKALPLPEEKTISKAKGQPREPQVCTLPPSREEMTKNQVSLSCAVKGFYPSDIAVEWESNGQPENNYKTTPPVLDSDGSFFLVSKLTVDKSRWQQGNVFSCSVLHEALHSHYTQKSLSLSPGK

SEQ ID NO: 1434 - DNA, 1653 bp, synthetic construct; identical to SEQ ID NO: 613
  source 1..1653: mol_type = other DNA

SEQ ID NO: 1435 - RNA, 1653 nt, synthetic construct; identical to SEQ ID NO: 805
  source 1..1653: mol_type = other RNA

SEQ ID NO: 1436 - protein, 549 aa, synthetic construct
MDWIWRILFLVGAATGAHSDFVLTQSPHSLSVTPGESASISCKSSHSLIHGDRNNYLAWYVQKPGRSPQLLIYLASSRASGVPDRFSGSGSDKDFTLKISRVETEDVGTYYCMQGRESPWTFGQGTKVDIKGGGGSGGGGSGGGGSGGGGSGGGGSQVHLTQSGPEVRKPGTSVKVSCKAPGNTLKTYDLHWVRSVPGQGLQWMGWISHEGDKKVIVERFKAKVTIDWDRSTNTAYLQLSGLTSGDTAVYYCAKGSKHRLRDYALYDDDGALNWAVDVDYLSNLEFWGQGTAVTVSSGGGGSGGGGSGGGGSGGGGSEPKSSDKTHTCPPCPAPELLGGPSVFLFPPKPKDTLMISRTPEVTCVVVDVSHEDPEVKFNWYVDGVEVHNAKTKPREEQYNSTYRVVSVLTVLHQDWLNGKEYKCKVSNKALPAPIEKTISKAKGQPREPQVYTLPPCREEMTKNQVSLWCLVKGFYPSDIAVEWESNGQPENNYKTTPPVLDSDGSFFLYSKLTVDKSRWQQGNVFSCSVLHEALHSHYTQKSLSLSPGK

SEQ ID NO: 1437 - DNA, 1653 bp, synthetic construct; identical to SEQ ID NO: 614
  source 1..1653: mol_type = other DNA

SEQ ID NO: 1438 - RNA, 1653 nt, synthetic construct; identical to SEQ ID NO: 806
  source 1..1653: mol_type = other RNA

SEQ ID NO: 1439 - protein, 549 aa, synthetic construct
MDWIWRILFLVGAATGAHSDFVLTQSPHSLSVTPGESASISCKSSHSLIHGDRNNYLAWYVQKPGRSPQLLIYLASSRASGVPDRFSGSGSDKDFTLKISRVETEDVGTYYCMQGRESPWTFGQGTKVDIKGGGGSGGGGSGGGGSGGGGSGGGGSQVHLTQSGPEVRKPGTSVKVSCKAPGNTLKTYDLHWVRSVPGQGLQWMGWISHEGDKKVIVERFKAKVTIDWDRSTNTAYLQLSGLTSGDTAVYYCAKGSKHRLRDYALYDDDGALNWAVDVDYLSNLEFWGQGTAVTVSSGGGGSGGGGSGGGGSGGGGSEPKSSDKTHTCPPCPAPELLAGPSVFLFPPKPKDTLMISRTPEVTCVVVDVSHEDPEVKFNWYVDGVEVHNAKTKPREEQYNSTYRVVSVLTVLHQDWLNGKEYKCKVSNKALPLPEEKTISKAKGQPREPQVYTLPPCREEMTKNQVSLWCLVKGFYPSDIAVEWESNGQPENNYKTTPPVLDSDGSFFLYSKLTVDKSRWQQGNVFSCSVLHEALHSHYTQKSLSLSPGK

SEQ ID NO: 1440 - DNA, 1653 bp, synthetic construct; identical to SEQ ID NO: 602
  source 1..1653: mol_type = other DNA

SEQ ID NO: 1441 - RNA, 1653 nt, synthetic construct; identical to SEQ ID NO: 794
  source 1..1653: mol_type = other RNA

SEQ ID NO: 1442 - protein, 549 aa, synthetic construct; identical to SEQ ID NO: 1424

SEQ ID NO: 1443 - DNA, 1653 bp, synthetic construct; identical to SEQ ID NO: 603
  source 1..1653: mol_type = other DNA

SEQ ID NO: 1444 - RNA, 1653 nt, synthetic construct; identical to SEQ ID NO: 795
  source 1..1653: mol_type = other RNA

SEQ ID NO: 1445 - protein, 549 aa, synthetic construct; identical to SEQ ID NO: 1352

SEQ ID NO: 1446 - DNA, 1653 bp, synthetic construct; identical to SEQ ID NO: 604
  source 1..1653: mol_type = other DNA

SEQ ID NO: 1447 - RNA, 1653 nt, synthetic construct; identical to SEQ ID NO: 796
  source 1..1653: mol_type = other RNA

SEQ ID NO: 1448 - protein, 549 aa, synthetic construct; identical to SEQ ID NO: 1427

SEQ ID NO: 1449 - DNA, 1653 bp, synthetic construct; identical to SEQ ID NO: 608
  source 1..1653: mol_type = other DNA

SEQ ID NO: 1450 - RNA, 1653 nt, synthetic construct; identical to SEQ ID NO: 800
  source 1..1653: mol_type = other RNA

SEQ ID NO: 1451 - protein, 549 aa, synthetic construct; identical to SEQ ID NO: 1430

SEQ ID NO: 1452 - DNA, 1653 bp, synthetic construct; identical to SEQ ID NO: 609
  source 1..1653: mol_type = other DNA

SEQ ID NO: 1453 - RNA, 1653 nt, synthetic construct; identical to SEQ ID NO: 801
  source 1..1653: mol_type = other RNA

SEQ ID NO: 1454 - protein, 549 aa, synthetic construct; identical to SEQ ID NO: 1433

SEQ ID NO: 1455 - DNA, 1653 bp, synthetic construct; identical to SEQ ID NO: 613
  source 1..1653: mol_type = other DNA

SEQ ID NO: 1456 - RNA, 1653 nt, synthetic construct; identical to SEQ ID NO: 805
  source 1..1653: mol_type = other RNA

SEQ ID NO: 1457 - protein, 549 aa, synthetic construct; identical to SEQ ID NO: 1436

SEQ ID NO: 1458 - DNA, 1653 bp, synthetic construct; identical to SEQ ID NO: 614
  source 1..1653: mol_type = other DNA

SEQ ID NO: 1459 - RNA, 1653 nt, synthetic construct; identical to SEQ ID NO: 806
  source 1..1653: mol_type = other RNA

SEQ ID NO: 1460 - protein, 549 aa, synthetic construct; identical to SEQ ID NO: 1439

SEQ ID NO: 1461-1462 - skipped (2 entries)

SEQ ID NO: 1463 - protein, 27 aa, Human alphaherpesvirus 1
MGGAAARLGAVILFVVIVGLHGVRSKY

SEQ ID NO: 1464 - protein, 25 aa, Human alphaherpesvirus 2
MGRLTSGVGTAALLVVAVGLRVVCA

SEQ ID NO: 1465 - protein, 28 aa, Human alphaherpesvirus 2
MGRLTSGVGTAALLVVAVGLRVVCAKYA

SEQ ID NO: 1466 - protein, 19 aa, Severe acute respiratory syndrome-related coronavirus
MFVFLVLLPLVSSQCVNLT

SEQ ID NO: 1467 - protein, 21 aa, Homo sapiens
MDWIWRILFLVGAATGAHSQM

SEQ ID NO: 1468 - protein, 19 aa, Homo sapiens
MDWTWRVFCLLAVAPGAHS

SEQ ID NO: 1469 - protein, 20 aa, Homo sapiens
METPAQLLFLLLLWLPDTTG

SEQ ID NO: 1470 - protein, 18 aa, synthetic construct
MDWTWILFLVAAATRVHS

SEQ ID NO: 1471 - protein, 24 aa, Japanese encephalitis virus
MLGSNSGQRVVFTILLLLVAPAYS

SEQ ID NO: 1472 - protein, 17 aa, synthetic construct
MKCLLYLAFLFIGVNCA

SEQ ID NO: 1473 - protein, 18 aa, synthetic construct
MDWTWILFLVAAATRVHS

SEQ ID NO: 1474 - protein, 19 aa, synthetic construct
ETPAQLLFLLLLWLPDTTG

SEQ ID NO: 1475 - protein, 24 aa, synthetic construct
MLGSNSGQRVVFTILLLLVAPAYS

SEQ ID NO: 1476 - protein, 17 aa, synthetic construct
MKCLLYLAFLFIGVNCA

SEQ ID NO: 1477 - protein, 15 aa, synthetic construct
MWLVSLAIVTACAGA

SEQ ID NO: 1478 - protein, 15 aa, synthetic construct
MFVFLVLLPLVSSQC

SEQ ID NO: 1479 - protein, 26 aa, synthetic construct
MRVMAPRTLILLLSGALALTETWAGS

SEQ ID NO: 1480 - protein, 19 aa, synthetic construct
MEFGLSWLFLVAILKGVQC

SEQ ID NO: 1481 - protein, 5 aa, synthetic construct
GSGGS

SEQ ID NO: 1482 - protein, 5 aa, synthetic construct
GGGGS

SEQ ID NO: 1483 - RNA, 20 nt, synthetic construct
  source 1..20: mol_type = other RNA
  repeat_region 1: note = The nucleotide A can be repeated upto 500 times
aaaaaaaaaaaaaaaaaaaa

SEQ ID NO: 1484 - protein, 5 aa, synthetic construct
TYDLH

SEQ ID NO: 1485 - protein, 8 aa, synthetic construct
WISHEGDK

SEQ ID NO: 1486 - protein, 32 aa, synthetic construct
GSKHRLRDYALYDDDGALNWAVDVDYLSNLEF

SEQ ID NO: 1487 - protein, 16 aa, synthetic construct
KSSHSLIHGDRNNYLA

SEQ ID NO: 1488 - protein, 7 aa, synthetic construct
LASSRAS

SEQ ID NO: 1489 - protein, 9 aa, synthetic construct
MQGRESPWT

SEQ ID NO: 1490 - protein, 7 aa, synthetic construct
GNTLKTY

SEQ ID NO: 1491 - protein, 6 aa, synthetic construct
SHEGDK

SEQ ID NO: 1492 - protein, 17 aa, synthetic construct
WISHEGDKKVIVERFKA

SEQ ID NO: 1493 - protein, 34 aa, synthetic construct
AKGSKHRLRDYALYDDDGALNWAVDVDYLSNLEF

SEQ ID NO: 1494 - protein, 141 aa, synthetic construct
QVQLVQSGPEVRKPGTSVKVSCKAPGNTLKTYDLHWVRSVPGQGLQWMGWISHEGDKKVIVERFKAKVTIDWDRSTNTAYLQLSGLTSGDTAVYYCAKGSKHRLRDYALYDDDGALNWAVDVDYLSNLEFWGQGTAVTVSS

SEQ ID NO: 1495 - protein, 107 aa, synthetic construct; identical to SEQ ID NO: 134

SEQ ID NO: 1496 - protein, 25 aa, synthetic construct
QVHLTQSGPEVRKPGTSVKVSCKAP

SEQ ID NO: 1497 - protein, 17 aa, synthetic construct
LHWVRSVPGQGLQWMGW

SEQ ID NO: 1498 - protein, 37 aa, synthetic construct
VIVERFKAKVTIDWDRSTNTAYLQLSGLTSGDTAVYY

SEQ ID NO: 1499 - protein, 10 aa, synthetic construct
GQGTAVTVSS

SEQ ID NO: 1500 - protein, 26 aa, synthetic construct
DFVLTQSPHSLSVTPGESASISCKSS

SEQ ID NO: 1501 - protein, 17 aa, synthetic construct
LAWYVQKPGRSPQLLIY

SEQ ID NO: 1502 - protein, 35 aa, synthetic construct
SRASGVPDRFSGSGSDKDFTLKISRVETEDVGTYY

SEQ ID NO: 1503 - protein, 9 aa, synthetic construct
GQGTKVDIK

1. A polyribonucleotide encoding an immunoglobulin chain of an antibody agent, wherein the immunoglobulin chain comprises a single chain fragment variable (scFv), and the scFv comprises a heavy chain variable (VH) domain, a linker, and a light chain variable (VL) domain,
wherein the VH domain comprises an HCDR1, an HCDR2, and an HCDR3, wherein the HCDR1, HCDR2, and HCDR3 comprise an amino acid sequence according to SEQ ID NO: 18, 21, and 24, respectively, and
wherein the VH domain comprises a first mutation at residue 3 and a second mutation at residue 5 relative to the amino acid sequence according to SEQ ID NO: 1494; and
wherein the VL domain comprises an LCDR1, an LCDR2, and an LCDR3, wherein the LCDR1, LCDR2, and LCDR3 comprise an amino acid sequence according to SEQ ID NO: 27, 30, and 33, respectively.

2. The polyribonucleotide of claim 1, wherein the first mutation comprises a substitution mutation that results in a positively charged amino acid being present at residue 3.

3. The polyribonucleotide of claim 2, wherein the positively charged amino acid comprises an amino acid selected from Lys (K), Arg (R), or His (H).

4. The polyribonucleotide of claim 2 or 3, wherein the positively charged amino acid comprises a His (H) residue.

5. The polyribonucleotide of any one of claims 1-4, wherein the second mutation comprises a substitution mutation that results in a polar amino acid being present at residue 5.

6. The polyribonucleotide of claim 5, wherein the polar amino acid comprises an amino acid selected from Ser (S), Thr (T), Tyr (Y), Asn (N), or Gln (Q).

7. The polyribonucleotide of claim 5 or 6, wherein the polar amino acid comprises a Thr (T) residue.

8. The polyribonucleotide of any one of claims 1-7, wherein the VH domain comprises an amino acid sequence that is at least 85% identical to the amino acid sequence according to SEQ ID NO: 36.

9. The polyribonucleotide of any one of claims 1-8, wherein the VH domain comprises an amino acid sequence that is at least 90% identical to the amino acid sequence according to SEQ ID NO: 36.

10. The polyribonucleotide of any one of claims 1-9, wherein the VH domain comprises an amino acid sequence SEQ ID NO: 1494 with substitution mutations Q3H and V5T.

11. The polyribonucleotide of any one of claims 1-10, wherein the VH domain comprises an amino acid sequence according to SEQ ID NO: 36.

12. The polyribonucleotide of any one of claims 1-11, wherein the VL domain comprises an amino acid sequence that is at least 85% identical to the amino acid sequence according to SEQ ID NO: 43.

13. The polyribonucleotide of any one of claims 1-12, wherein the VL domain comprises an amino acid sequence that is at least 90% identical to the amino acid sequence according to SEQ ID NO: 43.

14. The polyribonucleotide of any one of claims 1-13, wherein the VL domain comprises an amino acid sequence according to SEQ ID NO: 43.

15. The polyribonucleotide of any one of claims 1-14, wherein the scFv comprises, in order:
(i) the VH domain,
(ii) the linker, and
(iii) the VL domain.

16. The polyribonucleotide of any one of claims 1-14, wherein the scFv comprises, in order:
(i) the VL domain,
(ii) the linker, and
(iii) the VH domain.

17. The polyribonucleotide of any one of claims 1-16, wherein the linker comprises an amino acid sequence according to SEQ ID NO: 48.

18. The polyribonucleotide of any one of claims 1-16, wherein the linker comprises an amino acid sequence according to SEQ ID NO: 59.

19. The polyribonucleotide of any one of claims 1-18, wherein the immunoglobulin chain further comprises a second linker following the scFv domain.

20. The polyribonucleotide of claim 19, wherein the scFv and the second linker comprises or consists of an amino acid sequence according to SEQ ID NO: 64, 67, 70, or 73.

21. The polyribonucleotide of any one of claims 1-20, wherein the immunoglobulin chain comprises a hinge domain following the second linker.

22. The polyribonucleotide of claim 21, wherein the hinge domain comprises or consists of an amino acid sequence according to SEQ ID NO: 167.

23. The polyribonucleotide of any one of claims 1-9, wherein the immunoglobulin chain comprises one or more constant domains, and wherein the scFv is operably linked to the one or more constant domains.

24. The polyribonucleotide of claim 10, wherein the hinge domain is between the scFv and the one or more constant domains.

25. The polyribonucleotide of claim 10 or claim 11, wherein the one or more constant domains comprise a CH₃ domain.

26. The polyribonucleotide of claim 25, wherein the CH₃ domain comprises a G1m17,1 or a G1m3 allotype.

27. The polyribonucleotide of claim 26, wherein the CH₃ domain comprises one or more substitution mutations, wherein the one or more substitution mutations comprise or consist of M88L, N94S, or a combination thereof, and wherein the substitution mutation positions are relative to the amino acid sequence according to SEQ ID NO: 1495.

28. The polyribonucleotide of claim 27, wherein the CH₃ domain comprises substitution mutations at residue 16 and residue 18 relative to the amino acid sequence according to SEQ ID NO: 1495.

29. The polyribonucleotide of claim 28, wherein the CH₃ domain comprises substitution mutations D16E and L18M relative to the amino acid sequence according to SEQ ID NO: 1495.

30. The polyribonucleotide of any one of claims 25-29, wherein the CH₃ domain comprises or consists of an amino acid sequence according to SEQ ID NO: 116.

31. The polyribonucleotide of claim 1, wherein the immunoglobulin chain comprises or consists of a sequence according to SEQ ID NO: 1343.

32. The polyribonucleotide of claim 1, wherein the immunoglobulin chain comprises or consists of a sequence according to SEQ ID NO: 1346.

33. The polyribonucleotide of claim 1, wherein the immunoglobulin chain comprises or consists of a sequence according to SEQ ID NO: 1349.

34. The polyribonucleotide of claim 1, wherein the immunoglobulin chain comprises or consists of a sequence according to SEQ ID NO: 1352.

35. The polyribonucleotide of any one of claims 1-34, wherein the polyribonucleotide comprises a ribonucleic acid sequence encoding a secretion signal.

36. The polyribonucleotide of claim 35, wherein the secretion signal comprises a ribonucleic acid sequence that is at least 90% identical to SEQ ID NO: 4 or 8.

37. The polyribonucleotide of claim 36, wherein the secretion signal comprises a ribonucleic acid sequence comprises SEQ ID NO: 4 or 8.

38. The polyribonucleotide of any one of claims 1-37, wherein the polyribonucleotide comprises one or more non-coding sequence elements.

39. The polyribonucleotide of claim 38, wherein the one or more non-coding sequence elements enhances RNA stability and/or translation efficiency.

40. The polyribonucleotide of claim 38 or 39, wherein the one or more non-coding sequence elements comprise a 3′ untranslated region (UTR), a 5′ UTR, a 5′-cap, a polyadenine (polyA) tail, or any combination thereof.

41. The polyribonucleotide of claim 40, wherein the polyA tail is or comprises a modified polyA sequence, preferably an interrupted polyA tail.

42. The polyribonucleotide of claim 41, wherein the polyA tail comprises or consists of a sequence that is at least 90% identical to SEQ ID NO: 16.

43. The polyribonucleotide of any one of claims 40-42, wherein the 3′ UTR comprises or consists of a nucleic acid sequence that is at least 90% identical to SEQ ID NO: 14.

44. The polyribonucleotide of any one of claims 40-43, wherein the 5′ UTR comprises or consists of a nucleic acid sequence that is at least 90% identical to SEQ ID NO: 10.

45. The polyribonucleotide of any one of claims 40-44, wherein the 5′-cap is (m₂^{7,3′}-O)Gppp(m²′°)ApG.

46. The polyribonucleotide of any one of claims 1-45, wherein the polyribonucleotide comprises one or more modified ribonucleotides.

47. The polyribonucleotide of claim 46, wherein the one or more modified ribonucleotides comprise pseudouridine.

48. The polyribonucleotide of any one of claims 1-47, wherein the polyribonucleotide comprises or consists of a ribonucleic acid sequence according to SEQ ID NO: 1000.

49. The polyribonucleotide of any one of claims 1-47, wherein the polyribonucleotide comprises or consists of a ribonucleic acid sequence according to SEQ ID NO: 1048.

50. The polyribonucleotide of any one of claims 1-47, wherein the polyribonucleotide comprises or consists of a ribonucleic acid sequence according to SEQ ID NO: 1096.

51. The polyribonucleotide of any one of claims 1-47, wherein the polyribonucleotide comprises or consists of a ribonucleic acid sequence according to SEQ ID NO: 1144.

52. A polyribonucleotide comprising or consisting of a ribonucleic acid sequence according to any one of SEQ ID NOs: 1000, 1048, 1096, or 1044.

53. A composition comprising one or more polyribonucleotides of any one of claims 1-52.

54. The composition of claim 53, wherein the composition further comprises lipid nanoparticles, polyplexes (PLX), lipidated polyplexes (LPLX), or liposomes,
wherein the one or more polyribonucleotides are fully or partially encapsulated within the lipid nanoparticles, polyplexes (PLX), lipidated polyplexes (LPLX), or liposomes.

55. The composition of claim 53 or claim 54, wherein the composition further comprises lipid nanoparticles, wherein the one or more polyribonucleotides are encapsulated within the lipid nanoparticles.

56. The composition of claim 54 or claim 55, wherein the lipid nanoparticles are cationic lipid nanoparticles.

57. A pharmaceutical composition comprising the composition of any one of claims 53-56 and at least one pharmaceutically acceptable excipient.

58. The pharmaceutical composition of claim 57 for use in the treatment and/or prevention of HIV comprising administering the pharmaceutical composition to a subject.

59. A method comprising administering the pharmaceutical composition of claim 57 or claim 58 to a subject.

60. The method of claim 59 or the pharmaceutical composition for use according to claim 58, wherein administering the pharmaceutical composition to the subject results in expression of the antibody agent in the subject.

61. The method of claim 59 or 60 or the pharmaceutical composition for use according to claim 58, wherein the antibody agent is expressed in the subject at a titer of:
(a) at least 1 μg/ml in plasma; or
(b) at least 1 μg/ml in serum.

62. The method of claim 61, wherein the antibody agent is expressed in the subject at a titer of:
(a) at least 10 μg/ml in plasma; or
(b) at least 10 μg/ml in serum.

63. The method of claim 62, wherein the antibody agent is detectable in serum of a subject for period of time of at least 5 days, at least 10 days, at least 15 days, at least 20 days, at least 25 days, or at least 30 days.

64. The method of claim 62 or claim 63, wherein the antibody agent is detectable in serum of a subject for a period of time of at least 30 days.

65. The method of any one of claims 59-64 or the pharmaceutical composition for use according to claim 58, wherein the antibody agent is capable of neutralizing one or more HIV strains when tested in the TZM-bl cell pseudovirus neutralization assay at antibody agent concentrations up to 25 μg/ml.

66. The method of any one of claims 59-65 or the pharmaceutical composition for use according to claim 58, wherein the antibody agent delivered as a polyribonucleotide has higher neutralization activity of one or more HIV strains compared to an equivalent amount of parental control antibody delivered as a polyribonucleotide, wherein the parental control antibody is an IgG antibody comprising the same VH and VL domain as the antibody agent.

67. The method of claim 65 or claim 66, wherein the one of more HIV strains comprises one or more HIV strains selected from ZM53M.PB12, Du156.12, Q769.d22, 0330.v4.c3, R2184.c04, 89-F1_2_25, CAP204_2_00_F6_6, Ce1176_A3, 6980.v0.c31, PVO.4, CAP45, CNE8, T250-4, 3103.v3.c10 and C1080_c3.

68. The method of any one of claims 59-67 or the pharmaceutical composition for use according to claim 58, wherein the subject has or is at risk of developing an HIV infection.

69. The method of any one of claims 59-68, wherein the method is a method of treating and/or preventing an HIV infection.

70. Use of the composition of any one of claims 53-56 or the pharmaceutical composition of claim 57 or claim 58 for the treatment and/or prevention of HIV in a subject.

71. A method of producing an antibody agent comprising administering to cells the composition of any one of claims 51-54 or the pharmaceutical composition of claim 57 or claim 58 so that the cells express and secrete the antibody agent.

72. The method of claim 71, wherein the cells are in a subject and the antibody agent is produced at a therapeutically relevant plasma concentration or a therapeutically relevant serum concentration.

73. The method of claim 72, wherein the therapeutically relevant plasma concentration or the therapeutically relevant serum concentration is at least 10 μg/ml.
